(19) United States
(12) Patent Application Publication
(10) Pub. No.: US 2010/0086921 A1
(43) Pub. Date: Apr. 8, 2010

(54) GENETIC SUSCEPTIBILITY VARIANTS OF TYPE 2 DIABETES MELLITUS

(76) Inventors: Valgerdur Steinthorsdottir, Reykjavik (IS); Gudmar Thorleifsson, Reykjavik (IS)

Correspondence Address: HAMILTON, BROOK, SMITH & REYNOLDS, P.C., 530 VIRGINIA ROAD, P.O. BOX 9133, CONCORD, MA, 01742-9133, US

(21) Appl. No.: 12/442,233

(22) PCT Filed: Nov. 30, 2007
(86) PCT No.: PCT/IS07/00020

§ 371 Date: Aug. 12, 2009

(30) Foreign Application Priority Data
Nov. 30, 2006 (IS) 8572
Apr. 4, 2007 (IS) 8630

(51) Int. Cl. C12Q 1/68; G06F 19/00

(52) U.S. Cl. 435/6; 702/19

(57) ABSTRACT

Association analysis has shown that certain genetic variants are susceptibility variants for Type 2 diabetes. The invention relates to diagnostic applications of such susceptibility variants, including methods of determining increased susceptibility to Type 2 diabetes, as well as methods of determining decreased susceptibility to Type 2 diabetes in an individual. The invention further relates to kits for determining a susceptibility to Type 2 diabetes based on the variants described herein.

### BACKGROUND OF THE INVENTION

[0001] Diabetes mellitus, a metabolic disease wherein carbohydrate utilization is reduced and lipid and protein utilization is enhanced, is caused by an absolute or relative deficiency of insulin. In the more severe cases, diabetes is characterized by chronic hyperglycemia, glycosuria, water and electrolyte loss, ketoacidosis and coma. Long term complications include development of neuropathy, retinopathy, nephropathy, generalized degenerative changes in large and small blood vessels and increased susceptibility to infection. The most common form of diabetes is Type II, non-insulin-dependent diabetes that is characterized by hyperglycemia due to impaired insulin secretion and insulin resistance in target tissues. Both genetic and environmental factors contribute to the disease. For example, obesity plays a major role in the development of the disease. Type 2 diabetes is often a mild form of diabetes mellitus of gradual onset.

[0002] The health implications of Type 2 diabetes are enormous. In 1995, there were 135 million adults with diabetes worldwide. It is estimated that close to 300 million will have diabetes in the year 2025. (King, H., et al., Diabetes Care, 21(9): 1414-1431 (1998)). The prevalence of Type 2 diabetes in the adult population in Iceland is 2.5% (Vilbergsson, S., et al., Diabet. Med., 14(6): 491-498 (1997)), which comprises approximately 5,000 people over the age of 34 who have the disease.

[0003] Type 2 diabetes is characterized by hyperglycemia, which can occur through mechanisms such as impaired insulin secretion, insulin resistance in peripheral tissues and increased glucose output by the liver. Most Type 2 diabetes patients suffer serious complications of chronic hyperglycemia including nephropathy, neuropathy, retinopathy and accelerated development of cardiovascular disease. The prevalence of Type 2 diabetes worldwide is currently 6% but is projected to rise over the next decade (Amos, A. F., McCarty, D. J., Zimmet, P., Diabet Med 14 Suppl 5, S1 (1997)). This increase in prevalence of Type 2 diabetes is attributed to increasing age of the population and rise in obesity.

[0004] There is evidence for a genetic component to the risk of Type 2 diabetes, including prevalence differences between various racial groups (Zimmet, P. et al., Am J Epidemiol 118, 673 (1983), Knowler, W. C., Pettitt, D. J., Saad, M. F., Bennett, P. H., Diabetes Metab Rev 6, 1 (1990)), higher concordance rates among monozygotic than dizygotic twins (Newman, B. et al., Diabetologia 30, 763 (1987), Barnett, A. H., Eff, C., Leslie, R. D., Pyke, D. A., Diabetologia 20, 87 (1981)) and a sibling relative risk (λₛ) for Type 2 diabetes in European populations of approximately 3.5 (Gloyn, A. L., Ageing Res Rev 2, 111 (2003)).

[0005] Two approaches have thus far been used to search for genes associated with Type 2 diabetes. Single nucleotide polymorphisms (SNPs) within candidate genes have been tested for association and have, in general, not been replicated or confer only a modest risk of Type 2 diabetes—the most widely reported being a protective Pro12Ala polymorphism in the peroxisome proliferator activated receptor gamma gene (PPARG2) (Altshuler, D. et al., Nat Genet 26, 76 (2000)) and an at risk polymorphism in the potassium inwardly-rectifying channel, subfamily 3, member 11 gene (KIR6.2) (Gloyn A. L. et al., Diabetes 52, 568 (2003)).

[0006] Genome-wide linkage scans in families with the common form of Type 2 diabetes have yielded several loci, and the primary focus of international research consortia has been on loci on chromosomes 1, 12 and 20 observed in many populations (Gloyn, A. L., Ageing Res Rev 2, 111 (2003)). The genes in these loci have yet to be uncovered. However, in Mexican Americans, the calpain 10 (CAPN10) gene was isolated out of a locus on chromosome 2q (Horikawa, Y. et al., Nat Genet 26, 163 (2000)). The rare Mendelian forms of Type 2 diabetes, namely maturity-onset diabetes of the young (MODY), have yielded six genes by positional cloning (Gloyn, A. L., Ageing Res Rev 2, 111 (2003)).

[0007] Genome-wide significant linkage to chromosome 5q for Type 2 diabetes mellitus in the Icelandic population has been reported (Reynisdottir, I. et al., Am J Hum Genet 73, 323 (2003)); in the same study, suggestive evidence of linkage to 10q and 12q was also reported. Linkage to the 10q region has also been observed in Mexican Americans (Duggirala, R. et al., Am J Hum Genet 64, 1127 (1999)).

[0008] The transcription factor 7-like 2 gene (TCF7L2; formerly TCF4) has been associated with Type 2 diabetes (P=2.1×10(−9)) (Grant, S. F. et al., Nat Genet 38, 320 (2006)). The original finding in an Icelandic cohort of association of the microsatellite marker DG10S478 within intron 3 of the gene (P=2.1×10(−9)) was replicated in a Danish cohort (P=4.8×10(−3)) and in a US cohort (P=3.3×10(−9)). Compared with non-carriers, heterozygous and homozygous carriers of the at-risk alleles (38% and 7% of the population, respectively) have relative risks of 1.45 and 2.41. This corresponds to a population attributable risk of 21%. %. Association of the TCF7L2 variant has now been replicated in 10 independent studies with similar relative risk found in the different populations studied. The TCF7L2 gene product is a high mobility group box-containing transcription factor previously implicated in blood glucose homeostasis. It is thought to act through regulation of proglucagon gene expression in enteroendocrine cells via the Wnt signaling pathway.

[0009] Despite the advances in unraveling the genetics of Type 2 diabetes, the high prevalence of the disease and increasing population affected shows an unmet medical need to define additional genetic factors involved in Type 2 diabetes to more precisely define the associated risk factors. People with impaired fasting glucose or impaired glucose tolerance are asymptomatic but are at a high risk of developing Type 2 diabetes. Currently there is very little information to distinguish those within this high risk group, where lifestyle intervention would be the best choice for disease prevention, from those individuals for whom preventive medication would be more appropriate. Identification of susceptibility genes will allow a better understanding of the pathophysiology of the disease and as a direct benefit for the patient it will facilitate better approaches for diagnosis and treatment. Also needed are therapeutic agents for prevention of Type 2 diabetes.

### SUMMARY OF THE INVENTION

[0010] The present invention relates to methods of diagnosing an increased susceptibility to Type 2 diabetes, as well as methods of diagnosing a decreased susceptibility to Type 2 diabetes or diagnosing a protection against Type 2 diabetes, by evaluating certain markers or haplotypes that have been found to be associated with increased or decreased susceptibility of Type 2 diabetes.

[0011] In a first aspect, the present invention relates to a method of determining a susceptibility to Type 2 diabetes in a human individual, comprising determining the presence or absence of at least one allele of at least one polymorphic marker in a nucleic acid sample obtained from the individual, wherein the at least one polymorphic marker is selected from the markers set forth in Tables 10-12, and markers in linkage disequilibrium therewith, and wherein determination of the presence or absence of the at least one allele is indicative of a susceptibility to Type 2 diabetes. In one embodiment, the at least one polymorphic marker is selected from the markers set forth in Tables 10-12 and 14. In an alternative aspect the method of determining a susceptibility to Type 2 diabetes is a method of diagnosing a susceptibility to Type 2 diabetes.

[0012] In one embodiment, the at least one polymorphic marker is present within SEQ ID NO:1, SEQ ID NO:2 or SEQ ID NO:3. In another embodiment, the at least one polymorphic marker comprises at least one marker selected from rs2497304 (SEQ ID NO:16), rs947591 (SEQ ID NO:30), rs10882091 (SEQ ID NO:4), rs7914814 (SEQ ID NO:24), rs6583830 (SEQ ID NO:20), rs2421943 (SEQ ID NO:15), rs6583826 (SEQ ID NO:19), rs7752906 (SEQ ID NO:32), rs1569699 (SEQ ID NO:6), rs7756992 (SEQ ID NO:21), rs9350271 (SEQ ID NO:33), rs9356744 (SEQ ID NO:34), rs9368222 (SEQ ID NO:35), rs10440833 (SEQ ID NO:36), rs6931514 (SEQ ID NO:37), rs1860316 (SEQ ID NO:10), rs1981647 (SEQ ID NO:11), rs1843622 (SEQ ID NO:9), rs2191113 (SEQ ID NO:13), rs9890889 (SEQ ID NO:31), and markers in linkage disequilibrium therewith. In another embodiment, the at least one polymorphic marker comprises at least one marker in strong linkage disequilibrium, as defined by numeric values for |D′| of greater than 0.8 and/or r² of greater than 0.2, with one or more markers selected from the group consisting of the markers set forth in Table 22, Table 23 and Table 24. In one preferred embodiment, the at least one polymorphic marker is selected from markers rs7752906 (SEQ ID NO:32), rs1569699 (SEQ ID NO:6), rs7756992 (SEQ ID NO:21), rs9350271 (SEQ ID NO:33), rs9356744 (SEQ ID NO:34), rs9368222 (SEQ ID NO:35), rs10440833 (SEQ ID NO:36), rs6931514 (SEQ ID NO:37), and markers in linkage disequilibrium therewith. In another preferred embodiment, the at least one polymorphic marker is selected from markers rs7752906 (SEQ ID NO:32), rs1569699 (SEQ ID NO:6), rs7756992 (SEQ ID NO:21), rs9350271 (SEQ ID NO:33), rs9356744 (SEQ ID NO:34), rs9368222 (SEQ ID NO:35), rs10440833 (SEQ ID NO:36), and rs6931514 (SEQ ID NO:37). In one embodiment, the at least one marker is selected from marker rs7756992 (SEQ ID NO: 21), and markers in linkage disequilibrium therewith. In another embodiment, the at least one markers is selected from the markers set forth in Table 22. In another embodiment, the at least one marker is selected from marker rs10882091 (SEQ ID NO: 4), and markers in linkage disequilibrium therewith. In another embodiment, the at least one markers is selected from the markers set forth in Table 23. In yet another embodiment, the at least one marker is selected from marker rs2191113 (SEQ ID NO: 13), and markers in linkage disequilibrium therewith. In another embodiment, the at least one markers is selected from the markers set forth in Table 24.

[0013] In one embodiment, the method of determining a susceptibility, or diagnosing a susceptibility, of Type 2 diabetes, further comprises assessing the frequency of at least one haplotype in the individual. In one such embodiment, the at least one haplotype is selected from the haplotypes that comprise at least one polymorphic marker as set forth in Tables 1-6, and polymorphic markers in linkage disequilibrium therewith. In another embodiment, the at least one haplotype is selected from the haplotypes that comprise at least one polymorphic marker selected from at least one marker selected from rs2497304 (SEQ ID NO:16), rs947591 (SEQ ID NO:30), rs10882091 (SEQ ID NO:4), rs7914814 (SEQ ID NO:24), rs6583830 (SEQ ID NO:20), rs2421943 (SEQ ID NO:15), rs6583826 (SEQ ID NO:19), rs7752906 (SEQ ID NO:32), rs1569699 (SEQ ID NO:6), rs7756992 (SEQ ID NO:21), rs9350271 (SEQ ID NO:33), rs9356744 (SEQ ID NO:34), rs9368222 (SEQ ID NO:35), rs10440833 (SEQ ID NO:36), rs6931514 (SEQ ID NO:37), rs1860316 (SEQ ID NO:10), rs1981647 (SEQ ID NO:11), rs1843622 (SEQ ID NO:9), rs2191113 (SEQ ID NO:13), rs9890889 (SEQ ID NO:31), and markers in linkage disequilibrium therewith. In another embodiment, the at least one haplotype is selected from the haplotypes set forth in Tables 1-6 and 14.

[0014] In a second aspect, the invention relates to a method of determining a susceptibility to Type 2 diabetes in a human individual, comprising determining whether at least one at-risk allele in at least one polymorphic marker is present in a genotype dataset derived from the individual, wherein the at least one polymorphic marker is selected from the markers set forth in Tables 10-12, and markers in linkage disequilibrium therewith, and wherein determination of the presence of the at least one at-risk allele is indicative of increased susceptibility to Type 2 diabetes in the individual. The genotype dataset comprises in one embodiment information about marker identity, and the allelic status of the individual, i.e. information about the identity of the two alleles carried by the individual for the marker. The genotype dataset may comprise allelic information about one or more marker, including two or more markers, three or more markers, five or more markers, one hundred or more markers, etc. In some embodiments, the genotype dataset comprises genotype information from a whole-genome assessment of the individual including hundreds of thousands of markers, or even one million or more markers.

[0015] In one embodiment, the at least one polymorphic marker is present within SEQ ID NO:1, SEQ ID NO:2 or SEQ ID NO:3. In another embodiment, the at least one polymorphic marker comprises at least one marker selected from rs2497304 (SEQ ID NO:16), rs947591 (SEQ ID NO:30), rs10882091 (SEQ ID NO:4), rs7914814 (SEQ ID NO:24), rs6583830 (SEQ ID NO:20), rs2421943 (SEQ ID NO:15), rs6583826 (SEQ ID NO:19), rs7752906 (SEQ ID NO:32), rs1569699 (SEQ ID NO:6), rs7756992 (SEQ ID NO:21), rs9350271 (SEQ ID NO:33), rs9356744 (SEQ ID NO:34), rs9368222 (SEQ ID NO:35), rs10440833 (SEQ ID NO:36), rs6931514 (SEQ ID NO:37), rs1860316 (SEQ ID NO:10), rs1981647 (SEQ ID NO:11), rs1843622 (SEQ ID NO:9), rs2191113 (SEQ ID NO:13), rs9890889 (SEQ ID NO:31), and markers in linkage disequilibrium therewith. In another embodiment, the at least one polymorphic marker comprises at least one marker in strong linkage disequilibrium, as defined by numeric values for |D′| of greater than 0.8 and/or r² of greater than 0.2, with one or more markers selected from the group consisting of the markers set forth in Table 22, Table 23 and Table 24. In one preferred embodiment, the at least one polymorphic marker is selected from markers rs7752906 (SEQ ID NO:32), rs1569699 (SEQ ID NO:6), rs7756992 (SEQ ID NO:21), rs9350271 (SEQ ID NO:33), rs9356744 (SEQ ID NO:34), rs9368222 (SEQ ID NO:35), rs10440833 (SEQ ID NO:36), rs6931514 (SEQ ID NO:37), and markers in linkage disequilibrium therewith. In another preferred embodiment, the at least one polymorphic marker is selected from markers rs7752906 (SEQ ID NO:32), rs1569699 (SEQ ID NO:6), rs7756992 (SEQ ID NO:21), rs9350271 (SEQ ID NO:33), rs9356744 (SEQ ID NO:34), rs9368222 (SEQ ID NO:35), rs10440833 (SEQ ID NO:36), and rs6931514 (SEQ ID NO:37). In one embodiment, the at least one marker is selected from marker rs7756992 (SEQ ID NO: 21), and markers in linkage disequilibrium therewith. In another embodiment, the at least one markers is selected from the markers set forth in Table 22. In another embodiment, the at least one marker is selected from marker rs10882091 (SEQ ID NO: 4), and markers in linkage disequilibrium therewith. In another embodiment, the at least one markers is selected from the markers set forth in Table 23. In yet another embodiment, the at least one marker is selected from marker rs2191113 (SEQ ID NO: 13), and markers in linkage disequilibrium therewith. In another embodiment, the at least one markers is selected from the markers set forth in Table 24. In yet another embodiment, the at least one marker is selected from markers in linkage disequilibrium with the SLC30A gene on chromosome 8, between position 118,032,398 and 118,258,134 (NCBI Build 36 of the Human genome assembly). In one such embodiment, the at least one marker is located within the SLC30A gene.

[0016] In one embodiment, the method of determining a susceptibility, or diagnosing a susceptibility, of Type 2 diabetes, further comprises assessing the frequency of at least one haplotype in the individual. In one such embodiment, the at least one haplotype is selected from the haplotypes that comprise at least one polymorphic marker as set forth in Tables 1-6, and polymorphic markers in linkage disequilibrium therewith. In another embodiment, the at least one haplotype is selected from the haplotypes that comprise at least one polymorphic marker selected from at least one marker selected from rs2497304 (SEQ ID NO:16), rs947591 (SEQ ID NO:30), rs10882091 (SEQ ID NO:4), rs7914814 (SEQ ID NO:24), rs6583830 (SEQ ID NO:20), rs2421943 (SEQ ID NO:15), rs6583826 (SEQ ID NO:19), rs7752906 (SEQ ID NO:32), rs1569699 (SEQ ID NO:6), rs7756992 (SEQ ID NO:21), rs9350271 (SEQ ID NO:33), rs9356744 (SEQ ID NO:34), rs9368222 (SEQ ID NO:35), rs10440833 (SEQ ID NO:36), rs6931514 (SEQ ID NO:37), rs1860316 (SEQ ID NO:10), rs1981647 (SEQ ID NO:11), rs1843622 (SEQ ID NO:9), rs2191113 (SEQ ID NO:13), rs9890889 (SEQ ID NO:31), and markers in linkage disequilibrium therewith. In another embodiment, the at least one haplotype is selected from the haplotypes set forth in Tables 1-6 and 14.

[0017] In certain embodiments of the invention, determination of the presence of at least one at-risk allele of at least one polymorphic marker in a nucleic acid sample from the individual is indicative of an increased susceptibility to Type 2 diabetes. In one embodiment, the increased susceptibility is characterized by a relative risk (RR) or odds ratio (OR) of at least 1.15. In another embodiment, the increased susceptibility is characterized by a relative risk (RR) or odds ratio (OR) of at least 1.20.

[0018] In some embodiments, the presence of rs2497304 allele A, rs947591 allele A, rs10882091 allele C rs7914814 allele T, rs6583830 allele A, rs2421943 allele G, rs6583826 allele G, rs7752906 allele A, rs1569699 allele C, rs7756992 allele G, rs9350271 allele A, rs9356744 allele C, rs9368222 allele A, rs10440833 allele A, rs6931514 allele G, rs1860316 allele A, rs1981647 allele C, rs1843622 allele T, rs2191113 allele A, and/or rs9890889 allele A is indicative of increased susceptibility of Type 2 diabetes.

[0019] In particular embodiments, the presence of at least one protective allele in a nucleic acid sample from the individual is indicative of a decreased susceptibility of Type 2 diabetes. In another embodiment, the absence of at least one at-risk allele in a nucleic acid sample from the individual is indicative of a decreased susceptibility of Type 2 diabetes.

[0020] Particular embodiments of the methods of the invention relate to the at least one marker or haplotype being further associated with insulin response and/or impaired glucose tolerance in an individual.

[0021] In other embodiments, the presence of, or the determination of, at least one allele or haplotype in an at-risk marker is indicative of an increased susceptibility to Type 2 diabetes, and wherein the at least one allele or haplotype is further indicative of decreased insulin response and/or impaired glucose tolerance.

[0022] In certain embodiments of the invention, linkage disequilibrium is characterized by numeric values for |D′| of greater than 0.8 and/or r² of greater than 0.2. However, other values for the r² and |D′| measures are also possible in other embodiments, and such embodiments are also within the scope of the claimed invention, as described in further detail herein.

[0023] Another aspect of the invention relates to a method of assessing a susceptibility to Type 2 diabetes in a human individual, comprising screening a nucleic acid from the individual for at least one polymorphic marker or haplotype in SEQ ID NO:1, SEQ ID NO:2 or SEQ ID NO:3, that correlates with increased occurrence of Type 2 diabetes in a human population, wherein the presence of an at-risk marker allele in the at least one polymorphism or an at-risk haplotype in the nucleic acid identifies the individual as having elevated susceptibility to diabetes, and wherein the absence of the at least one at-risk marker allele or at-risk haplotype in the nucleic acid identifies the individual as not having the elevated susceptibility.

[0024] In one embodiment, the polymorphism or haplotype is selected from rs2497304 (SEQ ID NO:16), rs947591 (SEQ ID NO:30), rs10882091 (SEQ ID NO:4), rs7914814 (SEQ ID NO:24), rs6583830 (SEQ ID NO:20), rs2421943 (SEQ ID NO:15), rs6583826 (SEQ ID NO:19), rs7752906 (SEQ ID NO:32), rs1569699 (SEQ ID NO:6), rs7756992 (SEQ ID NO:21), rs9350271 (SEQ ID NO:33), rs9356744 (SEQ ID NO:34), rs9368222 (SEQ ID NO:35), rs10440833 (SEQ ID NO:36), rs6931514 (SEQ ID NO:37), rs1860316 (SEQ ID NO:10), rs1981647 (SEQ ID NO:11), rs1843622 (SEQ ID NO:9), rs2191113 (SEQ ID NO:13), rs9890889 (SEQ ID NO:31), and markers in linkage disequilibrium therewith, as characterized by numeric values for |D′| of greater than 0.8 and/or r² of greater than 0.2.

[0025] Certain embodiments of the invention further comprise a step of screening the nucleic acid for the presence of at least one at-risk genetic variant for Type 2 diabetes not associated with LD Block C06 (SEQ ID NO:1), LD Block C10 (SEQ ID NO:2) and LD Block C17 (SEQ ID NO:3). Such additional genetic variants can in specific embodiments include any variant that has been identified as a susceptibility or risk variant for Type 2 diabetes, including other variants described herein. In one embodiment, the step comprises screening the nucleic acid for the presence or absence of at least one at-risk allele of at least one at-risk variant for Type 2 diabetes in the TCF7L2 gene, wherein determination of the presence of the at least one at-risk allele is indicative of increased susceptibility of Type 2 diabetes. In another embodiment, the at least one at-risk variant in the TCF7L2 gene is selected from marker DG10S478, rs12255372, rs7895340, rs11196205, rs7901695, rs7903146, rs12243326 and rs4506565, and markers in linkage disequilibrium therewith.

[0026] In another aspect of the present invention, the presence of the marker or haplotype found to be associated with Type 2 diabetes, and as such useful for determining a susceptibility to Type 2 diabetes, is indicative of a different response rate of the subject to a particular treatment modality for Type 2 diabetes.

[0027] In another aspect, the invention relates to a method of identification of a marker for use in assessing susceptibility to Type 2 diabetes in human individuals, the method comprising:
[0028] identifying at least one polymorphic marker within SEQ ID NO:1, SEQ ID NO:2 or SEQ ID NO:3, or at least one polymorphic marker in linkage disequilibrium therewith;
[0029] determining the genotype status of a sample of individuals diagnosed with, or having a susceptibility to, Type 2 diabetes; and
[0030] determining the genotype status of a sample of control individuals;
   wherein a significant difference in frequency of at least one allele in at least one polymorphism in individuals diagnosed with, or having a susceptibility to, Type 2 diabetes, as compared with the frequency of the at least one allele in the control sample is indicative of the at least one polymorphism being useful for assessing susceptibility to Type 2 diabetes.

[0031] In one embodiment, “significant” is determined by statistical means, e.g. the difference is statistically significant. In one such embodiment, statistical significance is characterized by a P-value of less than 0.05. In other embodiments, the statistical significance is characterized a P-value of less than 0.01, less than 0.001, less than 0.0001, less than 0.00001, less than 0.000001, less than 0.0000001, less than 0.0000000001, or less than 0.00000001.

[0032] In one embodiment, the at least one polymorphic marker is in linkage disequilibrium, as characterized by numerical values of r² of greater than 0.2 and/or |D′| of greater than 0.8 with at least one marker selected from marker rs2497304 (SEQ ID NO:16), rs947591 (SEQ ID NO:30), rs10882091 (SEQ ID NO:4), rs7914814 (SEQ ID NO:24), rs6583830 (SEQ ID NO:20), rs2421943 (SEQ ID NO:15), rs6583826 (SEQ ID NO:19), rs7752906 (SEQ ID NO:32), rs1569699 (SEQ ID NO:6), rs7756992 (SEQ ID NO:21), rs9350271 (SEQ ID NO:33), rs9356744 (SEQ ID NO:34), rs9368222 (SEQ ID NO:35), rs10440833 (SEQ ID NO:36), rs6931514 (SEQ ID NO:37), rs1860316 (SEQ ID NO:10), rs1981647 (SEQ ID NO:11), rs1843622 (SEQ ID NO:9), rs2191113 (SEQ ID NO:13), rs9890889 (SEQ ID NO:31).

[0033] In one embodiment, an increase in frequency of the at least one allele in the at least one polymorphism in individuals diagnosed with, or having a susceptibility to, Type 2 diabetes, as compared with the frequency of the at least one allele in the control sample, is indicative of the at least one polymorphism being useful for assessing increased susceptibility to Type 2 diabetes. In another embodiment, a decrease in frequency of the at least one allele in the at least one polymorphism in individuals diagnosed with, or having a susceptibility to, Type 2 diabetes, as compared with the frequency of the at least one allele in the control sample is indicative of the at least one polymorphism being useful for assessing decreased susceptibility to, or protection against, Type 2 diabetes.

[0034] Another aspect of the invention relates to a method of genotyping a nucleic acid sample obtained from a human individual, comprising determining the presence or absence of at least one allele of at least one polymorphic marker in the sample, wherein the at least one marker is selected rs2497304 (SEQ ID NO:16), rs947591 (SEQ ID NO:30), rs10882091 (SEQ ID NO:4), rs7914814 (SEQ ID NO:24), rs6583830 (SEQ ID NO:20), rs2421943 (SEQ ID NO:15), rs6583826 (SEQ ID NO:19), rs7752906 (SEQ ID NO:32), rs1569699 (SEQ ID NO:6), rs7756992 (SEQ ID NO:21), rs9350271 (SEQ ID NO:33), rs9356744 (SEQ ID NO:34), rs9368222 (SEQ ID NO:35), rs10440833 (SEQ ID NO:36), rs6931514 (SEQ ID NO:37), rs1860316 (SEQ ID NO:10), rs1981647 (SEQ ID NO:11), rs1843622 (SEQ ID NO:9), rs2191113 (SEQ ID NO:13), rs9890889 (SEQ ID NO:31), and markers in linkage disequilibrium therewith, and wherein determination of the presence or absence of the at least one allele of the at least one polymorphic marker is predictive of a susceptibility of Type 2 diabetes.

[0035] In one embodiment, genotyping comprises amplifying a segment of a nucleic acid that comprises the at least one polymorphic marker by Polymerase Chain Reaction (PCR), using a nucleotide primer pair flanking the at least one polymorphic marker. In another embodiment, genotyping is performed using a process selected from allele-specific probe hybridization, allele-specific primer extension, allele-specific amplification, nucleic acid sequencing, 5′-exonuclease digestion, molecular beacon assay, oligonucleotide ligation assay, size analysis, and single-stranded conformation analysis. In one particular embodiment, the process comprises allele-specific probe hybridization. In another embodiment, the process comprises DNA sequencing. In a preferred embodiment, the method comprises:
[0036] 1) contacting copies of the nucleic acid with a detection oligonucleotide probe and an enhancer oligonucleotide probe under conditions for specific hybridization of the oligonucleotide probe with the nucleic acid;
   [0037] wherein
   [0038] a) the detection oligonucleotide probe is from 5-100 nucleotides in length and specifically hybridizes to a first segment of the nucleic acid whose nucleotide sequence is given by SEQ ID NO:1, SEQ ID NO:2 or SEQ ID NO:3 that comprises at least one polymorphic site;
   [0039] b) the detection oligonucleotide probe comprises a detectable label at its 3′ terminus and a quenching moiety at its 5′ terminus;
   [0040] c) the enhancer oligonucleotide is from 5-100 nucleotides in length and is complementary to a second segment of the nucleotide sequence that is 5′ relative to the oligonucleotide probe, such that the enhancer oligonucleotide is located 3′ relative to the detection oligonucleotide probe when both oligonucleotides are hybridized to the nucleic acid; and
   [0041] d) a single base gap exists between the first segment and the second segment, such that when the oligonucleotide probe and the enhancer oligonucleotide probe are both hybridized to the nucleic acid, a single base gap exists between the oligonucleotides;
[0042] 2) treating the nucleic acid with an endonuclease that will cleave the detectable label from the 3′ terminus of the detection probe to release free detectable label when the detection probe is hybridized to the nucleic acid; and
[0043] 3) measuring free detectable label, wherein the presence of the free detectable label indicates that the detection probe specifically hybridizes to the first segment of the nucleic acid, and indicates the sequence of the polymorphic site as the complement of the detection probe.

[0044] In a particular embodiment, the copies of the nucleic acid are provided by amplification by Polymerase Chain Reaction (PCR). In another embodiment, the susceptibility determined is increased susceptibility. In another embodiment, the susceptibility determined is decreased susceptibility.

[0045] Another aspect of the invention relates to a method of assessing an individual for probability of response to a therapeutic agent for preventing and/or ameliorating symptoms associated with Type 2 diabetes, comprising: determining the presence or absence of at least one allele of at least one polymorphic marker in a nucleic acid sample obtained from the individual, wherein the at least one polymorphic marker is selected from rs2497304 (SEQ ID NO:16), rs947591 (SEQ ID NO:30), rs10882091 (SEQ ID NO:4), rs7914814 (SEQ ID NO:24), rs6583830 (SEQ ID NO:20), rs2421943 (SEQ ID NO:15), rs6583826 (SEQ ID NO:19), rs7752906 (SEQ ID NO:32), rs1569699 (SEQ ID NO:6), rs7756992 (SEQ ID NO:21), rs9350271 (SEQ ID NO:33), rs9356744 (SEQ ID NO:34), rs9368222 (SEQ ID NO:35), rs10440833 (SEQ ID NO:36), rs6931514 (SEQ ID NO:37), rs1860316 (SEQ ID NO:10), rs1981647 (SEQ ID NO:11), rs1843622 (SEQ ID NO:9), rs2191113 (SEQ ID NO:13), rs9890889 (SEQ ID NO:31), and markers in linkage disequilibrium therewith, wherein determination of the presence of the at least one allele of the at least one marker is indicative of a probability of a positive response to the Type 2 diabetes therapeutic agent. In one embodiment, the Type 2 diabetes therapeutic agent is selected from the agents set forth in Agent Table 1 and Agent Table 2.

[0046] Yet another aspect of the invention relates to a method of predicting prognosis of an individual diagnosed with, Type 2 diabetes, the method comprising determining the presence or absence of at least one allele of at least one polymorphic marker in a nucleic acid sample obtained from the individual, wherein the at least one polymorphic marker is selected from the group consisting of rs2497304 (SEQ ID NO:16), rs947591 (SEQ ID NO:30), rs10882091 (SEQ ID NO:4), rs7914814 (SEQ ID NO:24), rs6583830 (SEQ ID NO:20), rs2421943 (SEQ ID NO:15), rs6583826 (SEQ ID NO:19), rs7752906 (SEQ ID NO:32), rs1569699 (SEQ ID NO:6), rs7756992 (SEQ ID NO:21), rs9350271 (SEQ ID NO:33), rs9356744 (SEQ ID NO:34), rs9368222 (SEQ ID NO:35), rs10440833 (SEQ ID NO:36), rs6931514 (SEQ ID NO:37), rs1860316 (SEQ ID NO:10), rs1981647 (SEQ ID NO:11), rs1843622 (SEQ ID NO:9), rs2191113 (SEQ ID NO:13), rs9890889 (SEQ ID NO:31), and markers in linkage disequilibrium therewith, wherein determination of the presence of the at least one allele is indicative of a worse prognosis of the Type 2 diabetes in the individual.

[0047] A further aspect of the invention relates to a method of monitoring progress of a treatment of an individual undergoing treatment for Type 2 diabetes, the method comprising determining the presence or absence of at least one allele of at least one polymorphic marker in a nucleic acid sample obtained from the individual, wherein the at least one polymorphic marker is selected from the group consisting of rs2497304 (SEQ ID NO:16), rs947591 (SEQ ID NO:30), rs10882091 (SEQ ID NO:4), rs7914814 (SEQ ID NO:24), rs6583830 (SEQ ID NO:20), rs2421943 (SEQ ID NO:15), rs6583826 (SEQ ID NO:19), rs7752906 (SEQ ID NO:32), rs1569699 (SEQ ID NO:6), rs7756992 (SEQ ID NO:21), rs9350271 (SEQ ID NO:33), rs9356744 (SEQ ID NO:34), rs9368222 (SEQ ID NO:35), rs10440833 (SEQ ID NO:36), rs6931514 (SEQ ID NO:37), rs1860316 (SEQ ID NO:10), rs1981647 (SEQ ID NO:11), rs1843622 (SEQ ID NO:9), rs2191113 (SEQ ID NO:13), rs9890889 (SEQ ID NO:31), and markers in linkage disequilibrium therewith, wherein determination of the presence of the at least one allele is indicative of the treatment outcome of the individual.

[0048] In one embodiment, the method further comprises assessing at least one biomarker in a sample from the individual. In another embodiment, the method further comprises analyzing non-genetic information to make risk assessment, diagnosis, or prognosis of the individual. The non-genetic information is in one embodiment selected from age, gender, ethnicity, socioeconomic status, previous disease diagnosis, medical history of subject, family history of Type 2 diabetes, biochemical measurements, and clinical measurements. In a particular preferred embodiment, a further step comprising calculating overall risk is employed.

[0049] The invention also relates to a kit for assessing susceptibility to Type 2 diabetes in a human individual, the kit comprising reagents for selectively detecting the presence or absence of at least one allele of at least one polymorphic marker in the genome of the individual, wherein the polymorphic marker is selected from the group consisting of polymorphic markers within the nucleic acid segments whose sequences are set forth in SEQ ID NO:1, SEQ ID NO:2 and SEQ ID NO:3, and markers in linkage disequilibrium therewith, and wherein the presence of the at least one allele is indicative of a susceptibility to Type 2 diabetes.

[0050] In one embodiment, the at least one polymorphic marker is selected from the group of markers set forth in Tables 10-12, and markers in linkage disequilibrium therewith. In another embodiment, the at least one polymorphic marker is selected from the group of markers set forth in Tables 10-12 and Table 14, and markers in linkage disequilibrium therewith. In another embodiment, the at least one polymorphic markers is selected from rs2497304 (SEQ ID NO:16), rs947591 (SEQ ID NO:30), rs10882091 (SEQ ID NO:4), rs7914814 (SEQ ID NO:24), rs6583830 (SEQ ID NO:20), rs2421943 (SEQ ID NO:15), rs6583826 (SEQ ID NO:19), rs7752906 (SEQ ID NO:32), rs1569699 (SEQ ID NO:6), rs7756992 (SEQ ID NO:21), rs9350271 (SEQ ID NO:33), rs9356744 (SEQ ID NO:34), rs9368222 (SEQ ID NO:35), rs10440833 (SEQ ID NO:36), rs6931514 (SEQ ID NO:37), rs1860316 (SEQ ID NO:10), rs1981647 (SEQ ID NO:11), rs1843622 (SEQ ID NO:9), rs2191113 (SEQ ID NO:13), rs9890889 (SEQ ID NO:31), and markers in linkage disequilibrium therewith. In another embodiment, the at least one polymorphic markers is selected from rs2497304 (SEQ ID NO:16), rs947591 (SEQ ID NO:30), rs10882091 (SEQ ID NO:4), rs7914814 (SEQ ID NO:24), rs6583830 (SEQ ID NO:20), rs2421943 (SEQ ID NO:15), rs6583826 (SEQ ID NO:19), rs7752906 (SEQ ID NO:32), rs1569699 (SEQ ID NO:6), rs7756992 (SEQ ID NO:21), rs9350271 (SEQ ID NO:33), rs9356744 (SEQ ID NO:34), rs9368222 (SEQ ID NO:35), rs10440833 (SEQ ID NO:36), rs6931514 (SEQ ID NO:37), rs1860316 (SEQ ID NO:10), rs1981647 (SEQ ID NO:11), rs1843622 (SEQ ID NO:9), rs2191113 (SEQ ID NO:13), and rs9890889 (SEQ ID NO:31).

[0051] In one embodiment, the reagents comprise at least one contiguous oligonucleotide that hybridizes to a fragment of the genome of the individual comprising the at least one polymorphic marker, a buffer and a detectable label. In one embodiment, the reagents comprise at least one pair of oligonucleotides that hybridize to opposite strands of a genomic nucleic acid segment obtained from the subject, wherein each oligonucleotide primer pair is designed to selectively amplify a fragment of the genome of the individual that includes one polymorphic marker, and wherein the fragment is at least 30 base pairs in size. In a particular embodiment the at least one oligonucleotide is completely complementary to the genome of the individual. In another embodiment, the at least one oligonucleotide can comprise at least one mismatch to the genome of the individual. In one embodiment, the oligonucleotide is about 18 to about 50 nucleotides in length. In another embodiment, the oligonucleotide is 20-30 nucleotides in length.

[0052] In one preferred embodiment, the kit comprises:
[0053] a detection oligonucleotide probe that is from 5-100 nucleotides in length; an enhancer oligonucleotide probe that is from 5-100 nucleotides in length; and an endonuclease enzyme;
[0054] wherein the detection oligonucleotide probe specifically hybridizes to a first segment of the nucleic acid whose nucleotide sequence is given by SEQ ID NO:1, SEQ ID NO:2 or SEQ ID NO:3 that comprises at least one polymorphic site; and wherein the detection oligonucleotide probe comprises a detectable label at its 3′ terminus and a quenching moiety at its 5′ terminus; wherein the enhancer oligonucleotide is from 5-100 nucleotides in length and is complementary to a second segment of the nucleotide sequence that is 5′ relative to the oligonucleotide probe, such that the enhancer oligonucleotide is located 3′ relative to the detection oligonucleotide probe when both oligonucleotides are hybridized to the nucleic acid; wherein a single base gap exists between the first segment and the second segment, such that when the oligonucleotide probe and the enhancer oligonucleotide probe are both hybridized to the nucleic acid, a single base gap exists between the oligonucleotides; and wherein treating the nucleic acid with the endonuclease will cleave the detectable label from the 3′ terminus of the detection probe to release free detectable label when the detection probe is hybridized to the nucleic acid.

[0055] A further aspect of the invention relates to the use of an oligonucleotide probe in the manufacture of a diagnostic reagent for diagnosing and/or assessing susceptibility to Type 2 diabetes in a human individual, wherein the probe hybridizes to a segment of a nucleic acid whose nucleotide sequence is given by SEQ ID NO: 1, SEQ ID NO:2 or SEQ ID NO:3 that comprises at least one polymorphic site, wherein the fragment is 15-500 nucleotides in length. In one embodiment, the polymorphic site is selected from the polymorphic markers rs2497304 (SEQ ID NO:16), rs947591 (SEQ ID NO:30), rs10882091 (SEQ ID NO:4), rs7914814 (SEQ ID NO:24), rs6583830 (SEQ ID NO:20), rs2421943 (SEQ ID NO:15), rs6583826 (SEQ ID NO:19), rs7752906 (SEQ ID NO:32), rs1569699 (SEQ ID NO:6), rs7756992 (SEQ ID NO:21), rs9350271 (SEQ ID NO:33), rs9356744 (SEQ ID NO:34), rs9368222 (SEQ ID NO:35), rs10440833 (SEQ ID NO:36), rs6931514 (SEQ ID NO:37), rs1860316 (SEQ ID NO:10), rs1981647 (SEQ ID NO:11), rs1843622 (SEQ ID NO:9), rs2191113 (SEQ ID NO:13), rs9890889 (SEQ ID NO:31), and polymorphisms in linkage disequilibrium therewith.

[0056] Yet another aspect of the invention relates to a computer-readable medium on which is stored: an identifier for at least one polymorphic marker; an indicator of the frequency of at least one allele of said at least one polymorphic marker in a plurality of individuals diagnosed with Type 2 diabetes; and an indicator of the frequency of the least one allele of said at least one polymorphic markers in a plurality of reference individuals; wherein the at least one polymorphic marker is selected from the polymorphic markers rs2497304 (SEQ ID NO:16), rs947591 (SEQ ID NO:30), rs10882091 (SEQ ID NO:4), rs7914814 (SEQ ID NO:24), rs6583830 (SEQ ID NO:20), rs2421943 (SEQ ID NO:15), rs6583826 (SEQ ID NO:19), rs7752906 (SEQ ID NO:32), rs1569699 (SEQ ID NO:6), rs7756992 (SEQ ID NO:21), rs9350271 (SEQ ID NO:33), rs9356744 (SEQ ID NO:34), rs9368222 (SEQ ID NO:35), rs10440833 (SEQ ID NO:36), rs6931514 (SEQ ID NO:37), rs1860316 (SEQ ID NO:10), rs1981647 (SEQ ID NO:11), rs1843622 (SEQ ID NO:9), rs2191113 (SEQ ID NO:13), rs9890889 (SEQ ID NO:31), and polymorphisms in linkage disequilibrium therewith. In one embodiment, linkage disequilibrium is defined as defined by numerical values of r² of at least 0.2 and/or values of |D′| of at least 0.8.

[0057] In one embodiment, information about the ancestry of the plurality of individuals is included. In another embodiment, the plurality of individuals diagnosed with Type 2 diabetes and the plurality of reference individuals is of a specific ancestry.

[0058] Another aspect relates to an apparatus for determining a genetic indicator for Type 2 diabetes in a human individual, comprising: a computer readable memory; and a routine stored on the computer readable memory; wherein the routine is adapted to be executed on a processor to analyze marker and/or haplotype information for at least one human individual with respect to at least one polymorphic marker selected from the markers rs2497304 (SEQ ID NO:16), rs947591 (SEQ ID NO:30), rs10882091 (SEQ ID NO:4), rs7914814 (SEQ ID NO:24), rs6583830 (SEQ ID NO:20), rs2421943 (SEQ ID NO:15), rs6583826 (SEQ ID NO:19), rs7752906 (SEQ ID NO:32), rs1569699 (SEQ ID NO:6), rs7756992 (SEQ ID NO:21), rs9350271 (SEQ ID NO:33), rs9356744 (SEQ ID NO:34), rs9368222 (SEQ ID NO:35), rs10440833 (SEQ ID NO:36), rs6931514 (SEQ ID NO:37), rs1860316 (SEQ ID NO:10), rs1981647 (SEQ ID NO:11), rs1843622 (SEQ ID NO:9), rs2191113 (SEQ ID NO:13), rs9890889 (SEQ ID NO:31), and markers in linkage disequilibrium therewith, as defined by numerical values of r² of at least 0.2 and/or values of |D′| of at least 0.8, and generate an output based on the marker or haplotype information, wherein the output comprises a risk measure of the at least one marker or haplotype as a genetic indicator of Type 2 diabetes for the human individual.

[0059] In one embodiment, the routine further comprises an indicator of the frequency of at least one allele of at least one polymorphic marker or at least one haplotype in a plurality of individuals diagnosed with Type 2 diabetes, and an indicator of the frequency of at the least one allele of at least one polymorphic marker or at least one haplotype in a plurality of reference individuals, and wherein a risk measure is based on a comparison of the at least one marker and/or haplotype status for the human individual to the indicator of the frequency of the at least one marker and/or haplotype information for the plurality of individuals diagnosed with Type 2 diabetes.

[0060] In certain embodiments of the methods, uses, apparatus or kits of the invention, linkage disequilibrium is characterized by numeric values for |D′| of greater than 0.8 and/or r² of greater than 0.2. However, other values for the r² and |D′| measures are also possible in other embodiments and such embodiments are also within the scope of the claimed invention, as described in further detail herein.

[0061] In certain other embodiments of the methods, uses, apparatus or kits of the invention, the individual is of a specific human ancestry. In one embodiment, the ancestry is selected from black African ancestry, Caucasian ancestry and Chinese ancestry. In another embodiment, the ancestry is black African ancestry. In another embodiment, the ancestry is European ancestry. In another embodiment, the ancestry is Caucasian ancestry. The ancestry is in certain embodiment self-reported by the individual who undergoes genetic analysis or genotyping. In other embodiments, the ancestry is determined by genetic determination comprising detecting at least one allele of at least one polymorphic marker in a nucleic acid sample from the individual, wherein the presence or absence of the allele is indicative of the ancestry of the individual.

[0062] In particular other embodiments of the methods, uses, apparatus or kits of the invention, the individual is obese. In other embodiments, the individual is non-obese. Obesity is in one embodiment determined by values of BMI (Body Mass Index) of greater than 25. In another embodiment, obesity is defined by values of BMI greater than 30. Other cutoff integer or fractional values of BMI are also possible and within scope of the invention, including, but not limited to BMI of greater than 23, 24, 25.5, 26, 26.5, 27, 27.5 and so on. Non-obese individuals are in one embodiment defined as all those individuals who do not fulfill the criteria of obesity by BMI. In other embodiments, non-obese individuals are those with a particular cutoff of BMI, such as BMI less than 25, less than 24, less than 23, less than 22, less than 21 or less than 20. Non-integer cutoff values of BMI values are also useful for defining non-obese individuals. In general, the obese and non-obese groups do not overlap in terms of their BMI values. In certain embodiments, the cutoff employed to define the groups is the same, e.g., greater than or smaller than BMI of 25. In other embodiments, a different cutoff is used, e.g., greater than 27 for obese individuals and smaller than 23 for non-obese individuals. All relevant ranges of BMI that are suitable for defining obese and non-obese individuals are also possible and within scope of the invention.

### BRIEF DESCRIPTION OF THE DRAWINGS

[0063] The foregoing and other objects, features and advantages of the invention will be apparent from the following more particular description of preferred embodiments of the invention.

[0064] FIG. 1 shows a plot linkage disequilibrium pattern in the region of chromosome 6p22.3 containing markers associated with Type 2 diabetes. (a) The X-axis shows positions with respect to NCBI Build 35 genome assembly (identical to Build 36), and the Y-axis shows a measure of linkage disequilibrium in the region. The span of the CDKAL1 gene is indicated by the arrows, and the locations of exons by black bars perpendicular to the diagonal line. The SNP markers are plotted equidistantly rather than according to their physical positions. The figure shows the r² measure of linkage disequilibrium, wherein the shading is proportional to pair-wise values of r² between markers. (b) A close-up of the 5′ end of the CDKAL gene, showing the LD Block C06 region (SEQ ID NO:1) within which several markers have been found to be associated with Type 2 diabetes. The location of several of the associated SNP markers is indicated on the figure.

[0065] FIG. 2 shows linkage disequilibrium in the region of chromosome 10q23.33 containing markers associated with Type 2 diabetes. The X-axis shows positions with respect to NCBI Build 35 genome assembly, and the Y-axis shows a measure of linkage disequilibrium in the region. The location of four associated SNP markers rs2497304, rs947591, rs10882091 and rs7914814 is indicated as well as the span and exons of the three genes within the LD block, IDE, KIF11 and HHEX. The figure shows the r² measure of linkage disequilibrium, wherein the shading is proportional to pair-wise values of r² between markers.

[0066] FIG. 3 shows linkage disequilibrium in the region of chromosome 17q24.3 containing markers associated with diabetes in non-obese and all patients. The location of five SNP markers, rs1860316, rs1981647, rs1843622, rs2191113 and rs9890889, is indicated. The figure shows the r² measure of linkage disequilibrium, wherein the shading is proportional to pair-wise values of r² between markers.

[0067] FIG. 4 shows a Q-Q plot of the 653,025 adjusted Chi²-statistics (circles) from the analysis of single SNPs and two marker haplotypes. The equiangular line (black line) is included in the plot for reference purpose. The dashed horizontal line indicates the threshold for genome-wide significance assuming a Bonferroni correction for the 653,025 SNPs/haplotypes and three phenotypes tested.

[0068] FIG. 5 presents a schematic view of the association of T2D to 6p22.3. a) The pair-wise correlation structure in a 1 Mb interval (20.5-21.5 Mb, NCBI Build34) on chromosome 6. The upper plot includes pair-wise D′ for 1047 common SNPs (with MAF>5%) from the HapMap release 19 for the CEU population, while the lower plot includes pair-wise r² values for the same set of SNPs. b) Location of recombination hot-spots in this interval based on the HapMap dataset (Nature 437, 1299-1320 (27 Oct. 2005))). c) Location of exons (vertical bars) of the two genes, E2F3 and CDKAL1, that map to the interval. d) Schematic view of the genome-wide association results in the interval for all T2D cases (black dots), non-obese T2D cases (open circles) and obese T2D cases (open triangles), respectively. Plotted is −log P, where P is the adjusted P value, against the chromosomal location of the markers. All four panels use the same horizontal Mb scale indicated at the bottom of panel d).

[0069] FIG. 6 shows CDKAL1 cDNA from INS-1 cells. Lanes 1 and 2 contain CDKAL1 cDNA amplified from exons 2 to 8 and exons 7 to 13, giving a band size of 596 bp and 738 bp, respectively. β-actin (837 bp) serves as a positive control in lane 3 and lane 4 is a negative control reaction without primers. Size standard is given on the left.

[0070] FIG. 7 shows the association of rs7756992 and rs13266634 to insulin secretion. Mean log-transformed insulin secretion levels, estimated by corrected insulin response (see Methods), for the three different genotypes of the two SNPs, rs7756992 and rs13266634. Results are shown for 3982 individuals (231 T2D cases and 3751 controls) from the Danish Inter99 study that had an oral glucose tolerance test. The number of individuals is included under each column, and the standard error (s.e.m.) is indicated as horizontal bars. The included P values are from regression of the log-transformed insulin secretion levels on genotype status, adjusting for age, sex and affection status, assuming either an additive model (P_{add}) or a recessive model (P_{rec}).

[0071] FIG. 8 presents further analysis of association of rs7756992 and rs13266634 with insulin secretion. a) Mean log-transformed insulin secretion levels, estimated by corrected insulin response (CIR) for the three different genotypes for the SNP rs7756992. The insulin secretion levels are estimated for a group of 3938 individuals from the Danish Inter99 cohort (223 T2D cases and 3715 controls) that had an OGTT. Results are shown for all individuals (leftmost bars) and males (middle bars) and females (rightmost bars) separately. The number of individuals behind each estimate is indicated in parenthesis below the columns together with the corresponding genotype. The standard error of the mean is indicated with a bar on top of each column. b) Corresponding estimates for the different genotypes of the SNP rs13266634 for 3926 individuals (228 T2D cases and 3698 controls).

### DETAILED DESCRIPTION OF THE INVENTION

[0072] A description of preferred embodiments of the invention follows.

[0073] The present invention discloses polymorphic markers and haplotypes that have been found to be associated with Type 2 diabetes. Particular alleles at certain polymorphic SNP markers and haplotypes comprising such alleles have been found to be associated with Type 2 diabetes. Such markers and haplotypes are useful for assessing susceptibility to Type 2 diabetes, as described in further detail herein. Further applications of the present invention include methods for assessing response to Type 2 diabetes therapeutic agents utilizing the polymorphic markers of the invention, as well as kits for assessing susceptibility of an individual to Type 2 diabetes.

### DEFINITIONS

[0074] The following terms shall, in the present context, have the meaning as indicated:

[0075] A “polymorphic marker”, sometime referred to as a “marker”, as described herein, refers to a genomic polymorphic site. Each polymorphic marker has at least two sequence variations characteristic of particular alleles at the polymorphic site. Thus, genetic association to a polymorphic marker implies that there is association to at least one specific allele of that particular polymorphic marker. The marker can comprise any allele of any variant type found in the genome, including SNPs, microsatellites, insertions, deletions, duplications and translocations.

[0076] An “allele” refers to the nucleotide sequence of a given locus (position) on a chromosome. A polymorphic marker allele thus refers to the composition (i.e., sequence) of the marker on a chromosome. Genomic DNA from an individual contains two alleles for any given polymorphic marker, representative of each copy of the marker on each chromosome. Sequence codes for nucleotides used herein are: A=1, C=2, G=3, T=4.

[0077] Sequence conucleotide ambiguity as described herein is as proposed by IUPAC-IUB. These codes are compatible with the codes used by the EMBL, GenBank, and PIR databases.

| IUB | Meaning |
|---|---|
| A | Adenosine |
| C | Cytidine |
| G | Guanine |
| T | Thymidine |
| R | G or A |
| Y | T or C |
| K | G or T |
| M | A or C |
| S | G or C |
| W | A or T |
| B | C G or T |
| D | A G or T |
| H | A C or T |
| V | A C or G |
| N | A C G or T (Any base) |

[0078] A nucleotide position at which more than one sequence is possible in a population (either a natural population or a synthetic population, e.g., a library of synthetic molecules) is referred to herein as a “polymorphic site”.

[0079] A “Single Nucleotide Polymorphism” or “SNP” is a DNA sequence variation occurring when a single nucleotide at a specific location in the genome differs between members of a species or between paired chromosomes in an individual. Most SNP polymorphisms have two alleles. Each individual is in this instance either homozygous for one allele of the polymorphism (i.e. both chromosomal copies of the individual have the same nucleotide at the SNP location), or the individual is heterozygous (i.e. the two sister chromosomes of the individual contain different nucleotides). The SNP nomenclature as reported herein refers to the official Reference SNP (rs) ID identification tag as assigned to each unique SNP by the National Center for Biotechnological Information (NCBI).

[0080] A “variant”, as described herein, refers to a segment of DNA that differs from the reference DNA. A “marker” or a “polymorphic marker”, as defined herein, is a variant. Alleles that differ from the reference are referred to as “variant” alleles.

[0081] A “microsatellite” is a polymorphic marker that has multiple small repeats of bases that are 2-8 nucleotides in length (such as CA repeats) at a particular site, in which the number of repeat lengths varies in the general population. An “indel” is a common form of polymorphism comprising a small insertion or deletion that is typically only a few nucleotides long.

[0082] A “haplotype,” as described herein, refers to a segment of genomic DNA that is characterized by a specific combination of alleles arranged along the segment. For diploid organisms such as humans, a haplotype comprises one member of the pair of alleles for each polymorphic marker or locus. In a certain embodiment, the haplotype can comprise two or more alleles, three or more alleles, four or more alleles, or five or more alleles. Haplotypes are described herein in the context of the marker name and the allele of the marker in that haplotype, e.g., “3 rs7758851” refers to the 3 allele of marker rs7758851 being in the haplotype, and is equivalent to “rs7758851 allele 3”. Furthermore, allelic codes in haplotypes are as for individual markers, i.e. 1=A, 2=C, 3=G and 4=T.

[0083] The term “susceptibility”, as described herein, encompasses both increased susceptibility and decreased susceptibility. Thus, particular alleles at polymorphic markers and/or haplotypes of the invention may be characteristic of increased susceptibility (i.e., increased risk) of Type 2 diabetes, as characterized by a relative risk (RR) or odds ratio (OR) of greater than one for the particular allele or haplotype. Alternatively, the markers and/or haplotypes of the invention are characteristic of decreased susceptibility (i.e., decreased risk) of Type 2 diabetes, as characterized by a relative risk of less than one.

[0084] A “nucleic acid sample” is a sample obtained from an individuals that contains nucleic acid. In certain embodiments, i.e. the detection of specific polymorphic markers and/or haplotypes, the nucleic acid sample comprises genomic DNA. Such a nucleic acid sample can be obtained from any source that contains genomic DNA, including as a blood sample, sample of amniotic fluid, sample of cerebrospinal fluid, or tissue sample from skin, muscle, buccal or conjunctival mucosa, placenta, gastrointestinal tract or other organs.

[0085] The term “Type 2 diabetes therapeutic agent” refers to an agent that can be used to ameliorate or prevent symptoms associated with Type 2 diabetes.

[0086] The term “Type 2 diabetes-associated nucleic acid”, as described herein, refers to a nucleic acid that has been found to be associated to Type 2 diabetes. This includes, but is not limited to, the markers and haplotypes described herein and markers and haplotypes in strong linkage disequilibrium (LD) therewith. In one embodiment, a Type 2 diabetes-associated nucleic acid refers to an LD-block found to be associated with Type 2 diabetes through at least one polymorphic marker located within the LD block.

[0087] The term “non-obese” refers, as described herein, to an individual with calculated Body Mass Index (BMI) below a pre-determined threshold, such as a threshold of 30 or lower. Other thresholds useful for defining the term are also possible, as described in more detail herein. The formula for calculating BMI is given by [body weight (in kg)]/[height (in m)]². The term “obese” refers to an individual with BMI above a certain pre-determined threshold, such as a threshold of 30.

[0088] The term “LD Block C06”, as described herein, refers to the Linkage Disequilibrium (LD) block on Chromosome 6 between markers rs4429936 and rs6908425, corresponding to position 20,634,996-20,836,710 of NCBI (National Center for Biotechnology Information) Build 35 (SEQ ID NO:1).

[0089] The term “LD Block C10”, as described herein, refers to the Linkage Disequilibrium (LD) block on Chromosome 10 between markers rs2798253 and rs11187152, corresponding to position 94,192,885-94,490,091 of NCBI (National Center for Biotechnology Information) Build 35 (SEQ ID NO:2).

[0090] The term “LD Block C17”, as described herein, refers to the Linkage Disequilibrium (LD) block on Chromosome 17 between markers rs11077501 and rs4793497, corresponding to position 66,037,656-66,163,076 of NCBI (National Center for Biotechnology Information) Build 35 (SEQ ID NO:3).

[0091] The term “CDKAL1”, as described herein, refers to the CDK5 regulatory subunit associated protein 1-like 1 gene, which spans locations 20,642,736-21,340,611 in NCBI Build 35 of the human genome.

[0092] The term “SLC30A8”, as described herein, refers to the Solute Carrier Family 30, member 8, gene. This gene is located on chromosome 8, its longest isoform spanning as much as 225 kb between positions 118,032,398 and 118,258,134 in NCBI Build 36 of the human genome assembly, corresponding to position 117,919,805 and 118,145,541, respectively in NCBI Build 34. In both these builds, the gene spans 225,736 by of genomic sequence.

[0093] Through genotyping of Icelandic Type 2 diabetes patients and population control individuals using the Illumina 330K chip that can be used to measure over 300,000 SNPs in the genome simultaneously, a number of variants associated with Type 2 diabetes have been identified by the present invention. Association analysis using single SNPs, two marker haplotypes and extended haplotypes within areas of extensive linkage disequilibrium (LD blocks) was performed across the genome. After correcting the p-value for relatedness, 49 single markers and two marker haplotypes were initially identified at 21 loci (i.e. genetic susceptibility locations in the genome) that had a p-value less than 5×10⁻⁵ (Table 1). In addition, 10 extended haplotypes at 8 additional loci were selected by the same criteria (Table 2). Within the patient group, 700 individuals were non-obese (BMI<30) and those were tested separately for association. After correcting the p-value for relatedness, 36 single markers and two marker haplotypes at 20 loci had a p-value less than 5×10⁻⁵ (Table 3). Three of those loci were also identified when the total group was analyzed. In addition, 6 extended haplotypes at 4 additional loci were selected by the same criteria (Table 4). The obese group of 531 patients (BMI>30) was also analyzed separately for association. After correcting the p-value for relatedness, 38 single markers and two marker haplotypes at 16 loci had a p-value less than 5×10⁻⁵ (Table 5). One of those loci was also identified when the total group was analyzed but no overlap was found between the non-obese and obese groups using this criteria. In addition 10 extended haplotypes at 7 additional loci had a p-value less than 5×10⁻⁵ in association analysis of obese diabetics (Table 6).

[0094] These single-marker association and two-marker and extended haplotype association results represent evidence for multiple susceptibility variants for Type 2 diabetes. It should be noted that for single-marker SNP analysis as presented herein, susceptibility variants can be represented by increased risk, wherein one allele is overrepresented in the patient group compared with controls. Alternatively, the susceptibility variants can be represented by the other allele of the SNP in question—for that allele, under-representation in patients compared with controls is expected. This is a natural consequence of association analysis to genetic elements comprising two alleles. For multi-marker haplotypes or for polymorphic markers comprising more than one marker, at-risk association may be observed to one (or more) at-risk allele or haplotype. Protective variants in form of association (with RR-values less than unity) to one (or more) protective variants or haplotypes may also be observed, depending on the genetic composition and haplotype structure in the genetic region in question.

[0095] One of the most significant association signals was identified by two single markers (rs1569699 and rs7756992) and three 2 marker haplotypes mapping to chromosome 6p22.3 (3 rs7758851 2 rs1569699, 1 rs4712527 3 rs7756992, 1 rs7756992 3 rs9295478; see Table 3). These markers are located within an area of extensive LD (LD block) between position 20634996 and 20836710 on chromosome 6 (NCBI Build 35; SEQ ID NO:1) between markers rs4429936 and rs6908425 (FIG. 1). This region contains the 5′ end including exons 1-5 of the gene CDK5 regulatory subunit associated protein 1-like 1 (CDKAL1) (NM_{—}017774). The association of these markers was verified in two additional Type 2 diabetes cohorts (see Table 7).

[0096] Follow up studies of the association of rs7756992 allele G with increased risk of Type 2 diabetes have established association of the marker to Type 2 diabetes in individuals of European ancestry (allele specific odds ratio (OR)=1.16; P=3.9×10⁻¹⁰), in individuals from Hong Kong of Han Chinese ancestry (OR=1.25; P=0.00018) (see Tables 14, 15 and 17). Additional variants within LD block C06 (SEQ ID NO:1) in LD with rs7756992 that have also been shown to be associated with Type 2 diabetes in European and Chinese populations include rs1569699, rs7752906, rs9350271, rs9356744, rs9368222, rs10440833 and rs6931514 (Table 18). The genotype odds ratio of the rs77566992 allele G variant supports a nearly recessive mode of inheritance (Table 20). In particular, the OR for the homozygote is 1.45 and 1.55 in the European and Hong Kong groups, respectively. The rs77566992 allele G at-risk variant has been found to be correlated with decreased insulin response in carriers (Table 21, FIGS. 7 and 8). Homozygous carriers of the variant have been found to have an estimated 24% less insulin response than heterozygotes or non-carriers suggesting that this variant confers risk of T2D through reduced insulin secretion. The rs7756992 marker, and markers in linkage disequilibrium therewith (including, but not limited to, rs1569699, rs7752906, rs9350271, rs9356744, rs9368222, rs10440833 and rs6931514) can therefore be used to assess increased susceptibility to Type 2 diabetes in an individual.

[0097] The function of the gene product of CDKAL1 is not known. However, as implied in the gene name the protein product is similar to another protein, CDK5 regulatory subunit associated protein 1 (CDK5RAP1). CDK5RAP1 is expressed in neuronal tissues where it inhibits cyclin dependent kinase 5 (CDK5) activity by binding to the CDK5 regulatory subunit p35 (Ching, Y. P., Pang, A. S., Lam, W. H., Qi, R. Z. & Wang, J. H. J Biol Chem 277, 15237-40 (2002)). In pancreatic beta cells, CDK5 has been shown to play a role in the loss of beta cell function under glucotoxic conditions (Wei, F. Y. et al. Nat Med 11, 1104-8 (2005). Furthermore, inhibition of the CDK5/p35 complex prevents decrease of insulin gene expression that results from glucotoxicity (Ubeda, M., Rukstalis, J. M. & Habener, J. F. J Biol Chem 281, 28858-64 (2006)). CDKAL1 might play a role in the inhibition of CDK5/p35 in pancreatic beta cells similar to that of CDK5RAP1 in neuronal tissue. Reduced expression of CDKAL1 or reduced inhibitory function thus could lead to an impaired response to glucotoxicity. The present data shows that CDKAL1 is expressed in the rat pancreatic beta cell line INS-1 (FIG. 6).

[0098] Based on the predicted function of CDKAL1 and known function of SLC30A8 we would expect both rs7756992 and rs13266634 to affect insulin secretion. To evaluate the effects of the two SNPs on insulin secretion we analyzed the effect of genotype status on corrected insulin response (CIR) in a set of individuals from the Inter99 study (part of Denmark B) that had undergone an oral glucose tolerance test (OGTT). For rs7756992, we demonstrated that the homozygote carriers of the risk allele had an estimated 24% less CIR than the heterozygote carriers or non-carriers (P<0.00001, FIG. 7). This observation is consistent with the variant's nearly recessive mode of inheritance with respect to disease risk. Furthermore, the effect observed on CIR is present in both males and females (FIG. 8) and in T2D patients as well as controls, and adjusting for BMI status did not affect the results (Table 21). The effect of rs13266634 on insulin response was smaller but significant and for this risk variant the reduction in CIR was consistent with an additive effect. No effect on insulin sensitivity was observed for either variant (Table 21).

[0099] The identification of CDKAL1 as a susceptibility gene for T2D adds a new piece to the puzzle of how genetic factors may predispose to T2D. Although the function of this gene remains to be elucidated we have shown that it is expressed in pancreatic beta cells and that a variant within the gene is correlated with insulin secretion. The similarity to CDK5RAP1 further indicates that CDKAL1 may facilitate insulin production under glucotoxic conditions through interaction with CDK5. In conclusion, we have identified a variant in the CDKAL1 gene that in a nearly recessive manner blunts the insulin response and predisposes to T2D.

[0100] The present invention has identified seven single markers and seven two marker haplotypes in a region on chromosome 10q23.33 to be associated with Type 2 diabetes (Table 1). Most of those markers are also associated to diabetes with elevated RR values when obese patients are analyzed separately (Table 5). These markers are located within one LD block between positions 94192885 and 94490091 (NCBI Build 35), corresponding to the genomic segment bridged by markers rs2798253 and rs11187152 (FIG. 2). This LD block contains three genes, Insulin-degrading enzyme (IDE) (NM_{—}004969), Kinesin family member 11 (KIF11) (NM_{—}004523) and Homeobox, hematopoietically expressed (HHEX) (NM_{—}002729).

[0101] IDE may belong to a protease family responsible for intercellular peptide signaling. Though its role in the cellular processing of insulin has not yet been defined, insulin-degrading enzyme is thought to be involved in the termination of the insulin response (Fakhrai-Rad et al, Human Molecular Genetics 9:2149-2158, 2000). Genetic analysis of the diabetic GK rat has revealed 2 amino acid substitutions in the IDE gene (H18R and A890V) in the GK allele which reduced insulin-degrading activity by 31% in transfected cells. However, when the H18R and A890V variants were studied separately, no effects were observed, suggesting a synergistic effect of the 2 variants on insulin degradation. No effect on insulin degradation was observed in cell lysates, suggesting that the effect may be coupled to receptor-mediated internalization of insulin. Congenic rats with the IDE GK allele displayed postprandial hyperglycemia, reduced lipogenesis in fat cells, blunted insulin-stimulated glucose transmembrane uptake, and reduced insulin degradation in isolated muscle. Analysis of additional rat strains demonstrated that the dysfunctional IDE allele was unique to GK rats. The authors concluded that IDE plays an important role in the diabetic phenotype in GK rats. IDE has been studied as a candidate gene for Type 2 diabetes in humans with inconsistent results. Two large studies have recently analyzed the association of IDE to Type 2 diabetes by mutation screening and haplotype analysis using tagging SNPs over the gene (Groves et al, Diabetes 52:1300-1305, 2003; Florez et al, Diabetes 55:128-135, 2006). Both studies conclude that common variants in IDE are unlikely to confer significant risk of Type 2 diabetes. These studies did however, not include the whole LD block as defined in FIG. 2 and at least some of the markers identified in our study as associated with Type 2 diabetes are outside the regions analyzed in those previous studies. Based on the results reported here, markers in LD with IDE are associated with Type 2 diabetes, providing genetic evidence for the role of IDE in the etiology of Type 2 diabetes.

[0102] KIF11 encodes a motor protein that belongs to the kinesin-like protein family. Members of this protein family are known to be involved in various kinds of spindle dynamics. The function of this gene product includes chromosome positioning, centrosome separation and establishing a bipolar spindle during cell mitosis. This gene is not a good functional candidate for diabetes but has to be considered as a positional candidate due to its location within the associated LD block.

[0103] HHEX encodes a member of the homeobox family of transcription factors, many of which are involved in developmental processes. Expression in specific hematopoietic lineages suggests that this protein may play a role in hematopoietic differentiation. HHEX is essential for pancreatic development; in HHEX negative mouse embryos there is a complete failure in ventral pancreatic specification (Bort et al, Development 131, 797-806, 2004). Other transcription factors involved in pancreatic development include the MODY genes as well as other factors that have been implicated in late onset diabetes. HHEX is also an essential effector of Wnt antagonist for heart induction (Foley and Mercola, GENES & DEVELOPMENT 19:387-396, 2005). This puts HHEX in the same pathway as the recently established Type 2 diabetes gene TCF7L2 and together these data make HHEX a functional as well as positional candidate for Type 2 diabetes.

[0104] The association of rs2497304, rs947591, rs10882091 and rs7914814 to Type 2 diabetes was verified in a Danish Type 2 diabetes case—control cohort and also in a US Caucasian cohort Type 2 diabetes cohort from the PENN CATH study (Table 8). When the two cohorts are combined the association of rs947591 reaches significance at the 0.05 level, with a risk of 1.1 in the combined cohort. When all the cohorts are combined the risk is 1.15 for the rs947591 marker. These results indicate that variants within the LD block on Chromosome 10 that includes IDE and HHEX are susceptibility variants for Type 2 diabetes.

[0105] Five single markers and two marker haplotypes in a region of chromosome 17q24.3 were furthermore found to be associated with Type 2 diabetes in non-obese patients (Table 3). Some of these markers show the strongest association reported in Table 3 and association to this region was also observed when all diabetics were analyzed (Table 1). These markers are located within two adjacent LD blocks located between positions 66037656 and 66163076 (NCBI Build 35) on chromosome 17, between markers rs11077501 and rs4793497 (FIG. 3). The association is significant at the genome-wide level. No known genes are located within these LD blocks. However, it is possible that variants in this region affect genes in neighboring regions including KCNJ2 and KCNJ16. Alternatively these variants may affect unknown genes within these LD blocks.

[0106] Further evidence for the association of rs7756992, and correlated markers within the LD block C06 that contains the 5′ end including exons 1-5 of the CDKAL1gene (NM_{—}017774) on chromosome 6p22.3, with Type 2 diabetes has come from additional association studies. Two equivalent markers, rs7754840 and rs10946398, highly correlated with rs7756992 (r2 0,68; D′ 0,95) were shown to be significantly associated with Type II diabetes in three large studies (Saxena, R et al. Science 2007; 316:1331-6; Zeggini, E et al. Science 2007; 316:1336-41; Scott, U et al. Science 2007; 316:1341-5). These studies thus further support the involvement of the CDKAL gene in Type 2 diabetes.

[0107] Association of rs10882091 and correlated markers on chromosome 10q23.33 with Type II diabetes is also supported by recent publications. A highly correlated marker, rs1111875 (r2 0,51; D′=1) was found to be significantly associated with Type II diabetes in four large studies (Sladek, R et al. Nature. 2007; 445:828-30; Saxena, R et al. Science 2007; 316:1331-6; Zeggini, E et al. Science 2007; 316:1336-41; Scott, U et al. Science 2007; 316:1341-5). Thus, recent studies provide additional support to the discoveries by the present inventors that markers in the LD Block C10 region as described herein are risk factors for Type 2 diabetes.

[0108] The genomic sequence within populations is not identical when individuals are compared. Rather, the genome exhibits sequence variability between individuals at many locations in the genome. Such variations in sequence are commonly referred to as polymorphisms, and there are many such sites within each genome For example, the human genome exhibits sequence variations which occur on average every 500 base pairs. The most common sequence variant consists of base variations at a single base position in the genome, and such sequence variants, or polymorphisms, are commonly called Single Nucleotide Polymorphisms (“SNPs”). These SNPs are believed to have occurred in a single mutational event, and therefore there are usually two possible alleles possible at each SNP site; the original allele and the mutated allele. Due to natural genetic drift and possibly also selective pressure, the original mutation has resulted in a polymorphism characterized by a particular frequency of its alleles in any given population. Many other types of sequence variants are found in the human genome, including microsatellites, insertions, deletions, inversions and copy number variations. A polymorphic microsatellite has multiple small repeats of bases (such as CA repeats, TG on the complimentary strand) at a particular site in which the number of repeat lengths varies in the general population. In general terms, each version of the sequence with respect to the polymorphic site represents a specific allele of the polymorphic site. These sequence variants can all be referred to as polymorphisms, occurring at specific polymorphic sites characteristic of the sequence variant in question. In general terms, polymorphisms can comprise any number of specific alleles. Thus in one embodiment of the invention, the polymorphism is characterized by the presence of two or more alleles in any given population. In another embodiment, the polymorphism is characterized by the presence of three or more alleles. In other embodiments, the polymorphism is characterized by four or more alleles, five or more alleles, six or more alleles, seven or more alleles, nine or more alleles, or ten or more alleles. All such polymorphisms can be utilized in the methods and kits of the present invention, and are thus within the scope of the invention.

[0109] In some instances, reference is made to different alleles at a polymorphic site without choosing a reference allele. Alternatively, a reference sequence can be referred to for a particular polymorphic site. The reference allele is sometimes referred to as the “wild-type” allele and it usually is chosen as either the first sequenced allele or as the allele from a “non-affected” individual (e.g., an individual that does not display a trait or disease phenotype).

[0110] Alleles for SNP markers as referred to herein refer to the bases A, C, G or T as they occur at the polymorphic site in the SNP assay employed. The allele codes for SNPs used herein are as follows: 1=A, 2=C, 3=G, 4=T. The person skilled in the art will however realise that by assaying or reading the opposite DNA strand, the complementary allele can in each case be measured. Thus, for a polymorphic site (polymorphic marker) characterized by an A/G polymorphism, the assay employed may be designed to specifically detect the presence of one or both of the two bases possible, i.e. A and G. Alternatively, by designing an assay that is designed to detect the opposite strand on the DNA template, the presence of the complementary bases T and C can be measured. Quantitatively (for example, in terms of relative risk), identical results would be obtained from measurement of either DNA strand (+ strand or − strand).

[0111] Typically, a reference sequence is referred to for a particular sequence. Alleles that differ from the reference are sometimes referred to as “variant” alleles. A variant sequence, as used herein, refers to a sequence that differs from the reference sequence but is otherwise substantially similar. Alleles at the polymorphic genetic markers described herein are variants. Additional variants can include changes that affect a polypeptide. Sequence differences, when compared to a reference nucleotide sequence, can include the insertion or deletion of a single nucleotide, or of more than one nucleotide, resulting in a frame shift; the change of at least one nucleotide, resulting in a change in the encoded amino acid; the change of at least one nucleotide, resulting in the generation of a premature stop codon; the deletion of several nucleotides, resulting in a deletion of one or more amino acids encoded by the nucleotides; the insertion of one or several nucleotides, such as by unequal recombination or gene conversion, resulting in an interruption of the coding sequence of a reading frame; duplication of all or a part of a sequence; transposition; or a rearrangement of a nucleotide sequence. Such sequence changes can alter the polypeptide encoded by the nucleic acid. For example, if the change in the nucleic acid sequence causes a frame shift, the frame shift can result in a change in the encoded amino acids, and/or can result in the generation of a premature stop codon, causing generation of a truncated polypeptide. Alternatively, a polymorphism associated with a disease or trait can be a synonymous change in one or more nucleotides (i.e., a change that does not result in a change in the amino acid sequence). Such a polymorphism can, for example, alter splice sites, affect the stability or transport of mRNA, or otherwise affect the transcription or translation of an encoded polypeptide. It can also alter DNA to increase the possibility that structural changes, such as amplifications or deletions, occur at the somatic level. The polypeptide encoded by the reference nucleotide sequence is the “reference” polypeptide with a particular reference amino acid sequence, and polypeptides encoded by variant alleles are referred to as “variant” polypeptides with variant amino acid sequences.

[0112] A haplotype refers to a segment of DNA that is characterized by a specific combination of alleles arranged along the segment. For diploid organisms such as humans, a haplotype comprises one member of the pair of alleles for each polymorphic marker or locus. In a certain embodiment, the haplotype can comprise two or more alleles, three or more alleles, four or more alleles, or five or more alleles, each allele corresponding to a specific polymorphic marker along the segment. Haplotypes can comprise a combination of various polymorphic markers, e.g., SNPs and microsatellites, having particular alleles at the polymorphic sites. The haplotypes thus comprise a combination of alleles at various genetic markers.

[0113] Detecting specific polymorphic markers and/or haplotypes can be accomplished by methods known in the art for detecting sequences at polymorphic sites. For example, standard techniques for genotyping for the presence of SNPs and/or microsatellite markers can be used, such as fluorescence-based techniques (Chen, X. et al., Genome Res. 9(5): 492-98 (1999)), utilizing PCR, LCR, Nested PCR and other techniques for nucleic acid amplification. Specific methodologies available for SNP genotyping include, but are not limited to, TaqMan genotyping assays and SNPlex platforms (Applied Biosystems), mass spectrometry (e.g., MassARRAY system from Sequenom), mini-sequencing methods, real-time PCR, Bio-Plex system (BioRad), CEQ and SNPstream systems (Beckman), Molecular Inversion Probe array technology (e.g., Affymetrix GeneChip), BeadArray Technologies (e.g., Illumina GoldenGate and Infinium assays) and Centaurus assay (Nanogen). By these or other methods available to the person skilled in the art, one or more alleles at polymorphic markers, including microsatellites, SNPs or other types of polymorphic markers, can be identified.

[0114] In certain methods described herein, an individual who is at an increased susceptibility (i.e., increased risk) for Type 2 diabetes, is an individual in whom at least one specific allele at one or more polymorphic marker or haplotype conferring increased susceptibility for Type 2 diabetes is identified (i.e., at-risk marker alleles or haplotypes). In one aspect, the at-risk marker or haplotype is one that confers a significant increased risk (or susceptibility) of Type 2 diabetes. In one embodiment, significance associated with a marker or haplotype is measured by a relative risk (RR). In another embodiment, significance associated with a marker or haplotype is measured by an odds ratio (OR). In a further embodiment, the significance is measured by a percentage. In one embodiment, a significant increased risk is measured as a risk (relative risk and/or odds ratio) of at least 1.2, including but not limited to: at least 1.2, at least 1.3, at least 1.4, at least 1.5, at least 1.6, at least 1.7, 1.8, at least 1.9, at least 2.0, at least 2.5, at least 3.0, at least 4.0, and at least 5.0. In a particular embodiment, a risk (relative risk and/or odds ratio) of at least 1.2 is significant. In another particular embodiment, a risk of at least 1.3 is significant. In yet another embodiment, a risk of at least 1.4 is significant. In a further embodiment, a relative risk of at least about 1.5 is significant. In another further embodiment, a significant increase in risk is at least about 1.7 is significant. However, other cutoffs are also contemplated, e.g. at least 1.15, 1.25, 1.35, and so on, and such cutoffs are also within scope of the present invention. In other embodiments, a significant increase in risk is at least about 20%, including but not limited to about 25%, 30%, 35%, 40%, 45%, 50%, 55%, 60%, 65%, 70%, 75%, 80%, 85%, 90%, 95%, 100%, 150%, 200%, 300%, and 500%. In one particular embodiment, a significant increase in risk is at least 20%. In other embodiments, a significant increase in risk is at least 30%, at least 40%, at least 50%, at least 60%, at least 70%, at least 80%, at least 90% and at least 100%. Other cutoffs or ranges as deemed suitable by the person skilled in the art to characterize the invention are however also contemplated, and those are also within scope of the present invention.

[0115] An at-risk polymorphic marker or haplotype of the present invention is one where at least one allele of at least one marker or haplotype is more frequently present in an individual at risk for the disease or trait (affected), compared to the frequency of its presence in a comparison group (control), and wherein the presence of the marker or haplotype is indicative of susceptibility to the disease or trait. The control group may in one embodiment be a population sample, i.e. a random sample from the general population. In another embodiment, the control group is represented by a group of individuals who are disease-free. Such disease-free control may in one embodiment be characterized by the absence of one or more specific disease-associated symptoms. In another embodiment, the disease-free control group is characterized by the absence of one or more disease-specific risk factors. Such risk factors are in one embodiment at least one environmental risk factor. Representative environmental factors are natural products, minerals or other chemicals which are known to affect, or contemplated to affect, the risk of developing the specific disease or trait. Other environmental risk factors are risk factors related to lifestyle, including but not limited to food and drink habits, geographical location of main habitat, and occupational risk factors. In another embodiment, the risk factors are at least one genetic risk factor.

[0116] As an example of a simple test for correlation would be a Fisher-exact test on a two by two table. Given a cohort of chromosomes, the two by two table is constructed out of the number of chromosomes that include both of the markers or haplotypes, one of the markers or haplotypes but not the other and neither of the markers or haplotypes.

[0117] In other embodiments of the invention, an individual who is at a decreased susceptibility (i.e., at a decreased risk) for Type 2 diabetes is an individual in whom at least one specific allele at one or more polymorphic marker or haplotype conferring decreased susceptibility for Type 2 diabetes is identified. The marker alleles and/or haplotypes conferring decreased risk are also said to be protective. In one aspect, the protective marker or haplotype is one that confers a significant decreased risk (or susceptibility) of the disease or trait. In another embodiment, the absence of an at-risk allele in a nucleic acid sample from the individual is also indicative of a protection against disease, by virtue of the absence of at-risk alleles. In one embodiment, significant decreased risk is measured as a relative risk of less than 0.9, including but not limited to less than 0.9, less than 0.8, less than 0.7, less than 0.6, less than 0.5, less than 0.4, less than 0.3, less than 0.2 and less than 0.1. In one particular embodiment, significant decreased risk is less than 0.7. In another embodiment, significant decreased risk is less than 0.5. In yet another embodiment, significant decreased risk is less than 0.3. In another embodiment, the decrease in risk (or susceptibility) is at least 20%, including but not limited to at least 25%, at least 30%, at least 35%, at least 40%, at least 45%, at least 50%, at least 55%, at least 60%, at least 65%, at least 70%, at least 75%, at least 80%, at least 85%, at least 90%, at least 95% and at least 98%. In one particular embodiment, a significant decrease in risk is at least about 30%. In another embodiment, a significant decrease in risk is at least about 50%. In another embodiment, the decrease in risk is at least about 70%. Other cutoffs or ranges as deemed suitable by the person skilled in the art to characterize the invention are however also contemplated, and those are also within scope of the present invention.

[0118] The person skilled in the art will appreciate that for markers with two alleles present in the population being studied (such as SNPs), and wherein one allele is found in increased frequency in a group of individuals with a trait or disease in the population, compared with controls, the other allele of the marker will be found in decreased frequency in the group of individuals with the trait or disease, compared with controls. In such a case, one allele of the marker (the one found in increased frequency in individuals with the trait or disease) will be the at-risk allele, while the other allele will be a protective allele.

### Linkage Disequilibrium

[0119] The natural phenomenon of recombination, which occurs on average once for each chromosomal pair during each meiotic event, represents one way in which nature provides variations in sequence (and biological function by consequence). It has been discovered that recombination does not occur randomly in the genome; rather, there are large variations in the frequency of recombination rates, resulting in small regions of high recombination frequency (also called recombination hotspots) and larger regions of low recombination frequency, which are commonly referred to as Linkage Disequilibrium (LD) blocks (Myers, S. et al., Biochem Soc Trans 34:526-530 (2006); Jeffreys, A. J., et al., Nature Genet 29:217-222 (2001); May, C. A., et al., Nature Genet 31:272-275 (2002)).

[0120] Linkage Disequilibrium (LD) refers to a non-random assortment of two genetic elements. For example, if a particular genetic element (e.g., an allele of a polymorphic marker, or a haplotype) occurs in a population at a frequency of 0.50 (50%) and another element occurs at a frequency of 0.50 (50%), then the predicted occurrence of a person's having both elements is 0.25 (25%), assuming a random distribution of the elements. However, if it is discovered that the two elements occur together at a frequency higher than 0.25, then the elements are said to be in linkage disequilibrium, since they tend to be inherited together at a higher rate than what their independent frequencies of occurrence (e.g., allele or haplotype frequencies) would predict. Roughly speaking, LD is generally correlated with the frequency of recombination events between the two elements. Allele or haplotype frequencies can be determined in a population by genotyping individuals in a population and determining the frequency of the occurrence of each allele or haplotype in the population. For populations of diploids, e.g., human populations, individuals will typically have two alleles for each genetic element (e.g., a marker, haplotype or gene).

[0121] Many different measures have been proposed for assessing the strength of linkage disequilibrium (LD). Most capture the strength of association between pairs of biallelic sites. Two important pairwise measures of LD are r² (sometimes denoted Δ²) and |D′|. Both measures range from 0 (no disequilibrium) to 1 ('complete' disequilibrium), but their interpretation is slightly different. |D′| is defined in such a way that it is equal to 1 if just two or three of the possible haplotypes are present, and it is <1 if all four possible haplotypes are present. Therefore, a value of |D′| that is <1 indicates that historical recombination may have occurred between two sites (recurrent mutation can also cause |D′| to be <1, but for single nucleotide polymorphisms (SNPs) this is usually regarded as being less likely than recombination). The measure r² represents the statistical correlation between two sites, and takes the value of 1 if only two haplotypes are present.

[0122] The r² measure is arguably the most relevant measure for association mapping, because there is a simple inverse relationship between r² and the sample size required to detect association between susceptibility loci and SNPs. These measures are defined for pairs of sites, but for some applications a determination of how strong LD is across an entire region that contains many polymorphic sites might be desirable (e.g., testing whether the strength of LD differs significantly among loci or across populations, or whether there is more or less LD in a region than predicted under a particular model). Measuring LD across a region is not straightforward, but one approach is to use the measure r, which was developed in population genetics. Roughly speaking, r measures how much recombination would be required under a particular population model to generate the LD that is seen in the data. This type of method can potentially also provide a statistically rigorous approach to the problem of determining whether LD data provide evidence for the presence of recombination hotspots. For the methods, kits, procedures, media and apparati described herein, a significant r² value can be at least 0.05, such as at least 0.1, 0.15, 0.2, 0.25, 0.3, 0.35, 0.4, 0.45, 0.5, 0.55, 0.6, 0.65, 0.7, 0.75, 0.8, 0.85, 0.9, 0.91, 0.92, 0.93, 0.94, 0.95, 0.96, 0.97, 0.98, 0.99 or 1.0. In one preferred embodiment, the significant r² value can be at least 0.2. Alternatively, linkage disequilibrium as described herein, refers to linkage disequilibrium characterized by values of |D′| of at least 0.2, such as 0.3, 0.4, 0.5, 0.6, 0.7, 0.8, 0.85, 0.9, 0.95, 0.96, 0.97, 0.98, 0.99. Thus, linkage disequilibrium represents a correlation between alleles of distinct markers. It is measured by correlation coefficient or |D′| (r² up to 1.0 and |D′| up to 1.0). In certain embodiments, linkage disequilibrium is defined in terms of values for both the r² and |D′| measures. In one such embodiment, a significant linkage disequilibrium is defined as r²>0.1 and |D′|>0.8. In another embodiment, a significant linkage disequilibrium is defined as r²>0.2 and |D′|>0.9. Other combinations and permutations of values of r² and |D′| for determining linkage disequilibrium are also possible, and within the scope of the invention. Linkage disequilibrium can be determined in a single human population, as defined herein, or it can be determined in a collection of samples comprising individuals from more than one human population. In one embodiment of the invention, LD is determined in a sample from one or more of the HapMap populations (caucasian, african, japanese, chinese), as defined (http://www.hapmap.org). In one such embodiment, LD is determined in the CEU population of the HapMap samples. In another embodiment, LD is determined in the YRI population. In yet another embodiment, LD is determined in samples from the Icelandic population.

[0123] If all polymorphisms in the genome were identical at the population level, then every single one of them would need to be investigated in association studies. However, due to linkage disequilibrium between polymorphisms, tightly linked polymorphisms are strongly correlated, which reduces the number of polymorphisms that need to be investigated in an association study to observe a significant association. Another consequence of LD is that many polymorphisms may give an association signal due to the fact that these polymorphisms are strongly correlated.

[0124] Genomic LD maps have been generated across the genome, and such LD maps have been proposed to serve as framework for mapping disease-genes (Risch, N. & Merkiangas, K, Science 273:1516-1517 (1996); Maniatis, N., et al., Proc Natl Acad Sci USA 99:2228-2233 (2002); Reich, D E et al, Nature 411:199-204 (2001)).

[0125] It is now established that many portions of the human genome can be broken into series of discrete haplotype blocks containing a few common haplotypes; for these blocks, linkage disequilibrium data provides little evidence indicating recombination (see, e.g., Wall., J. D. and Pritchard, J. K., Nature Reviews Genetics 4:587-597 (2003); Daly, M. et al., Nature Genet. 29:229-232 (2001); Gabriel, S. B. et al., Science 296:2225-2229 (2002); Patil, N. et al., Science 294:1719-1723 (2001); Dawson, E. et al., Nature 418:544-548 (2002); Phillips, M. S. et al., Nature Genet. 33:382-387 (2003)).

[0126] There are two main methods for defining these haplotype blocks: blocks can be defined as regions of DNA that have limited haplotype diversity (see, e.g., Daly, M. et al., Nature Genet. 29:229-232 (2001); Patil, N. et al., Science 294:1719-1723 (2001); Dawson, E. et al., Nature 418:544-548 (2002); Zhang, K. et al., Proc. Natl. Acad. Sci. USA 99:7335-7339 (2002)), or as regions between transition zones having extensive historical recombination, identified using linkage disequilibrium (see, e.g., Gabriel, S. B. et al., Science 296:2225-2229 (2002); Phillips, M. S. et al., Nature Genet. 33:382-387 (2003); Wang, N. et al., Am. J. Hum. Genet. 71:1227-1234 (2002); Stumpf, M. P., and Goldstein, D. B., Curr. Biol. 13:1-8 (2003)). More recently, a fine-scale map of recombination rates and corresponding hotspots across the human genome has been generated (Myers, S., et al., Science 310:321-32324 (2005); Myers, S. et al., Biochem Soc Trans 34:526530 (2006)). The map reveals the enormous variation in recombination across the genome, with recombination rates as high as 10-60 cM/Mb in hotspots, while closer to 0 in intervening regions, which thus represent regions of limited haplotype diversity and high LD. The map can therefore be used to define haplotype blocks/LD blocks as regions flanked by recombination hotspots. As used herein, the terms “haplotype block” or “LD block” includes blocks defined by any of the above described characteristics, or other alternative methods used by the person skilled in the art to define such regions.

[0127] Haplotype blocks can be used to map associations between phenotype and haplotype status, using single markers or haplotypes comprising a plurality of markers. The main haplotypes can be identified in each haplotype block, and then a set of “tagging” SNPs or markers (the smallest set of SNPs or markers needed to distinguish among the haplotypes) can then be identified. These tagging SNPs or markers can then be used in assessment of samples from groups of individuals, in order to identify association between phenotype and haplotype. If desired, neighboring haplotype blocks can be assessed concurrently, as there may also exist linkage disequilibrium among the haplotype blocks.

[0128] It has thus become apparent that for any given observed association to a polymorphic marker in the genome, it is likely that additional markers in the genome also show association. This is a natural consequence of the uneven distribution of LD across the genome, as observed by the large variation in recombination rates. The markers used to detect association thus in a sense represent “tags” for a genomic region (i.e., a haplotype block or LD block) that is associating with a given disease or trait, and as such are useful for use in the methods and kits of the present invention. One or more causative (functional) variants or mutations may reside within the region found to be associating to the disease or trait. Such variants may confer a higher relative risk (RR) or odds ratio (OR) than observed for the tagging markers used to detect the association. The present invention thus refers to the markers used for detecting association to the disease, as described herein, as well as markers in linkage disequilibrium with the markers. Thus, in certain embodiments of the invention, markers that are in LD with the markers and/or haplotypes of the invention, as described herein, may be used as surrogate markers. The surrogate markers have in one embodiment relative risk (RR) and/or odds ratio (OR) values smaller than for the markers or haplotypes initially found to be associating with the disease, as described herein. In other embodiments, the surrogate markers have RR or OR values greater than those initially determined for the markers initially found to be associating with the disease, as described herein. An example of such an embodiment would be a rare, or relatively rare (<10% allelic population frequency) variant in LD with a more common variant (>10% population frequency) initially found to be associating with the disease, such as the variants described herein. Identifying and using such markers for detecting the association discovered by the inventors as described herein can be performed by routine methods well known to the person skilled in the art, and are therefore within the scope of the present invention.

[0129] It is possible that certain polymorphic markers in linkage disequilibrium with the markers shown herein to be associated with Type 2 diabetes are located outside the physical boundaries of the LD block as defined. This is a consequence of the historical recombination rates in the region in question, which may have led to a region of strong LD (the LD block), with residual markers outside the block in LD with markers within the block. Such markers are also within scope of the present invention, as they are equally useful for practicing the invention by virtue of their genetic relationship with the markers shown herein to be associated with Type 2 diabetes. Examples are shown in Table 22 (rs17234378; SEQ ID NO:44), Table 23 (rs7086285; SEQ ID NO:43) and Table 24 (rs9890889; SEQ ID NO:31; rs2009802; SEQ ID NO:38; rs17718938; SEQ ID NO:39; rs2109050; SEQ ID NO:41; rs1962801; SEQ ID NO:42.

### Determination of Haplotype Frequency

[0130] The frequencies of haplotypes in patient and control groups can be estimated using an expectation-maximization algorithm (Dempster A. et al., J. R. Stat. Soc. B, 39:1-38 (1977)). An implementation of this algorithm that can handle missing genotypes and uncertainty with the phase can be used. Under the null hypothesis, the patients and the controls are assumed to have identical frequencies. Using a likelihood approach, an alternative hypothesis is tested, where a candidate at-risk-haplotype, which can include the markers described herein, is allowed to have a higher frequency in patients than controls, while the ratios of the frequencies of other haplotypes are assumed to be the same in both groups. Likelihoods are maximized separately under both hypotheses and a corresponding 1-df likelihood ratio statistic is used to evaluate the statistical significance.

[0131] To look for at-risk and protective markers and haplotypes within a region of interest, for example, association of all possible combinations of genotyped markers is studied, provided those markers span a practical region. The combined patient and control groups can be randomly divided into two sets, equal in size to the original group of patients and controls. The marker and haplotype analysis is then repeated and the most significant p-value registered is determined. This randomization scheme can be repeated, for example, over 100 times to construct an empirical distribution of p-values. In a preferred embodiment, a p-value of <0.05 is indicative of a significant marker and/or haplotype association.

### Haplotype Analysis

[0132] One general approach to haplotype analysis involves using likelihood-based inference applied to NEsted MOdels (Gretarsdottir S., et al., Nat. Genet. 35:131-38 (2003)). The method is implemented in the program NEMO, which allows for many polymorphic markers, SNPs and microsatellites. The method and software are specifically designed for case-control studies where the purpose is to identify haplotype groups that confer different risks. It is also a tool for studying LD structures. In NEMO, maximum likelihood estimates, likelihood ratios and p-values are calculated directly, with the aid of the EM algorithm, for the observed data treating it as a missing-data problem.

[0133] Even though likelihood ratio tests based on likelihoods computed directly for the observed data, which have captured the information loss due to uncertainty in phase and missing genotypes, can be relied on to give valid p-values, it would still be of interest to know how much information had been lost due to the information being incomplete. The information measure for haplotype analysis is described in Nicolae and Kong (Technical Report 537, Department of Statistics, University of Statistics, University of Chicago; Biometrics, 60(2):368-75 (2004)) as a natural extension of information measures defined for linkage analysis, and is implemented in NEMO.

[0134] For single marker association to a disease or trait (e.g., Type 2 diabetes), the Fisher exact test can be used to calculate two-sided p-values for each individual allele. Usually, all p-values are presented unadjusted for multiple comparisons unless specifically indicated. The presented frequencies (for microsatellites, SNPs and haplotypes) are allelic frequencies as opposed to carrier frequencies. To minimize any bias due the relatedness of the patients who were recruited as families for the linkage analysis, first and second-degree relatives can be eliminated from the patient list. Furthermore, the test can be repeated for association correcting for any remaining relatedness among the patients, by extending a variance adjustment procedure described in Risch, N. & Teng, J. (Genome Res., 8:1273-1288 (1998)), DNA pooling (ibid) for sibships so that it can be applied to general familial relationships, and present both adjusted and unadjusted p-values for comparison. The differences are in general very small as expected. To assess the significance of single-marker association corrected for multiple testing we can carry out a randomization test using the same genotype data. Cohorts of patients and controls can be randomized and the association analysis redone multiple times (e.g., up to 500,000 times) and the p-value is the fraction of replications that produced a p-value for some marker allele that is lower than or equal to the p-value we observed using the original patient and control cohorts.

[0135] For both single-marker and haplotype analyses, relative risk (RR) and the population attributable risk (PAR) can be calculated assuming a multiplicative model (haplotype relative risk model) (Terwilliger, J. D. & Ott, J., Hum. Hered. 42:337-46 (1992) and Falk, C. T. & Rubinstein, P, Ann. Hum. Genet. 51 (Pt 3):227-33 (1987)), i.e., that the risks of the two alleles/haplotypes a person carries multiply. For example, if RR is the risk of A relative to a, then the risk of a person homozygote AA will be RR times that of a heterozygote Aa and RR² times that of a homozygote aa. The multiplicative model has a nice property that simplifies analysis and computations—haplotypes are independent, i.e., in Hardy-Weinberg equilibrium, within the affected population as well as within the control population. As a consequence, haplotype counts of the affecteds and controls each have multinomial distributions, but with different haplotype frequencies under the alternative hypothesis. Specifically, for two haplotypes, hᵢ and hⱼ, risk(hᵢ)/risk(hⱼ)=(fᵢ/pᵢ)/(fⱼ/pⱼ), where f and p denote, respectively, frequencies in the affected population and in the control population. While there is some power loss if the true model is not multiplicative, the loss tends to be mild except for extreme cases. Most importantly, p-values are always valid since they are computed with respect to null hypothesis.

### Risk Assessment and Diagnostics

[0136] As described herein, certain polymorphic markers and haplotypes comprising such markers are found to be useful for risk assessment of Type 2 diabetes. Risk assessment can involve the use of the markers for diagnosing a susceptibility to Type 2 diabetes. Particular alleles of polymorphic markers are found more frequently in individuals with Type 2 diabetes, than in individuals without diagnosis of Type 2 diabetes. Therefore, these marker alleles have predictive value for detecting Type 2 diabetes, or a susceptibility to Type 2 diabetes, in an individual. Tagging markers within haplotype blocks or LD blocks comprising at-risk markers, such as the markers of the present invention, can be used as surrogates for other markers and/or haplotypes within the haplotype block or LD block. Markers with values of r² equal to 1 are perfect surrogates for the at-risk variants, i.e. genotypes for one marker perfectly predicts genotypes for the other. Markers with smaller values of r² than 1 can also be surrogates for the at-risk variant, or alternatively represent variants with relative risk values as high as or possibly even higher than the at-risk variant.

[0137] The at-risk variant identified may not be the functional variant itself, but is in this instance in linkage disequilibrium with the true functional variant. The present invention encompasses the assessment of such surrogate markers for the markers as disclosed herein. Such markers are annotated, mapped and listed in public databases (e.g., dbSNP), as well known to the skilled person, or can alternatively be readily identified by sequencing the region or a part of the region identified by the markers of the present invention in a group of individuals, and identify polymorphisms in the resulting group of sequences. As a consequence, the person skilled in the art can readily and without undue experimentation genotype surrogate markers in linkage disequilibrium with the markers and/or haplotypes as described herein. The tagging or surrogate markers in LD with the at-risk variants detected, also have predictive value for detecting association to Type 2 diabetes, or a susceptibility to Type 2 diabetes, in an individual.

[0138] The markers and haplotypes as described herein, e.g., the markers presented in Tables 1-24, may be useful for risk assessment and diagnostic purposes for, either alone or in combination. The markers and haplotypes can also be combined with other markers conferring increased risk for Type 2 diabetes. Even in cases where the increase in risk by individual markers is relatively modest, i.e. on the order of 10-30%, the association may have significant implications. Thus, relatively common variants may have significant contribution to the overall risk (Population Attributable Risk is high), or combination of markers can be used to define groups of individual who, based on the combined risk of the markers, is at significant combined risk of developing the disease. The markers described herein to be associated with Type 2 diabetes can therefore be combined with other polymorphic markers or haplotypes reported or found to be associated with Type 2 diabetes, so as to obtain an overall risk of the disease based on a plurality of genetic markers.

[0139] In one such embodiment, the polymorphic markers or haplotypes described herein are assessed together with information about markers within the TCF7L2 gene. Association of variants within this gene is well established (Grant S. F., et al., Nat Genet. 38:320-3 (2006)) and has been replicated in a large number of populations (Florez, J. C., Curr Opin Clin Nutr Metabol Care 10:391-396 (2007). The marker rs7903146 within the TCF7L2 gene, or other markers in LD with the marker (e.g., rs12255372) can be used to determine the genetic risk conferred by the at-risk variant in the gene (OR about 1.44).

[0140] Markers in other genes have recently been implicated in the etiology of Type 2 diabetes as risk factors, including PPARG (rs1801282), KCNJ11 (rs5215), TCF2 (rs4430796), WFS1 (rs10010131), CDKN2A-2B (rs1081161), IGF2BP2 (rs4402960) and FTO (rs805136) (Frayling, T. M. Nature Reviews Genetics 8:657-662 (2007). These markers, or markers in linkage disequilibrium therewith can likewise also be used in methods combining determination of the presence or absence of at-risk variants for Type 2 diabetes with the variants reported herein, so as to obtain an overall risk assessment of Type 2 diabetes.

[0141] Thus, in one embodiment of the invention, a plurality of variants (genetic markers and/or biomarkers and/or haplotypes) is used for overall risk assessment. These variants are in one embodiment selected from the variants as disclosed herein. Other embodiments include the use of the variants of the present invention in combination with other variants known to be useful for diagnosing a susceptibility to Type 2 diabetes. In such embodiments, the genotype status of a plurality of markers and/or haplotypes is determined in an individual, and the status of the individual compared with the population frequency of the associated variants, or the frequency of the variants in clinically healthy subjects, such as age-matched and sex-matched subjects. Methods known in the art, such as multivariate analyses or joint risk analyses, may subsequently be used to determine the overall risk conferred based on the genotype status at the multiple loci. Assessment of risk based on such analysis may subsequently be used in the methods and kits of the invention, as described herein.

[0142] As described in the above, the haplotype block structure of the human genome has the effect that a large number of variants (markers and/or haplotypes) in linkage disequilibrium with the variant originally associated with a disease or trait may be used as surrogate markers for assessing association to the disease or trait. The number of such surrogate markers will depend on factors such as the historical recombination rate in the region, the mutational frequency in the region (i.e., the number of polymorphic sites or markers in the region), and the extent of LD (size of the LD block) in the region. These markers are usually located within the physical boundaries of the LD block or haplotype block in question as defined using the methods described herein, or by other methods known to the person skilled in the art. However, sometimes marker and haplotype association is found to extend beyond the physical boundaries of the haplotype block as defined. Such markers and/or haplotypes may in those cases be also used as surrogate markers and/or haplotypes for the markers and/or haplotypes physically residing within the haplotype block as defined. As a consequence, markers and haplotypes in LD (typically characterized by r² greater than 0.1, such as r² greater than 0.2, including r² greater than 0.3, also including r² greater than 0.4) with the markers and haplotypes of the present invention are also within the scope of the invention, even if they are physically located beyond the boundaries of the haplotype block as defined. This includes markers that are described herein (e.g., markers listed in Tables 22, 23 and 24), but may also include other markers that are in linkage disequilibrium (e.g., characterized by r² greater than 0.2 and/or |D′|>0.8) with one or more of the markers listed in Tables 22, 23 and 24.

[0143] For the SNP markers described herein, the opposite allele to the allele found to be in excess in patients (at-risk allele) is found in decreased frequency in Type 2 diabetes. These markers and haplotypes in LD and/or comprising such markers, are thus protective for Type 2 diabetes, i.e. they confer a decreased risk or susceptibility of individuals carrying these markers and/or haplotypes developing Type 2 diabetes. Alternatively speaking, the absence of at-risk alleles of at-risk variants implies the presence of the alternate allele for biallelic markers such as SNPs. Thus, the absence of at-risk variants as described herein is indicative of a protection against Type 2 diabetes.

[0144] As described herein, haplotypes comprising a combination of genetic markers, e.g., SNPs and microsatellites, can be useful for risk assessment. Detecting haplotypes can be accomplished by methods known in the art and/or described herein for detecting sequences at polymorphic sites. Furthermore, correlation between certain haplotypes or sets of markers and disease phenotype can be verified using standard techniques. A representative example of a simple test for correlation would be a Fisher-exact test on a two by two table.

[0145] In specific embodiments, a marker or haplotype found to be associated with Type 2 diabetes, is one in which a marker or haplotype is more frequently present in an individual at risk for Type 2 diabetes (e.g., an affected person), compared to the frequency of its presence in a healthy individual (control) or in a randomly selected individual from the population (population control), wherein the presence of the marker allele or haplotype is indicative of Type 2 diabetes or a susceptibility to Type 2 diabetes. In other embodiments, at-risk markers in linkage disequilibrium with one or more markers found to be associated with Type 2 diabetes are tagging markers that are more frequently present in an individual at risk for Type 2 diabetes (e.g., affected individuals), compared to the frequency of their presence in controls, wherein the presence of the tagging markers is indicative of increased susceptibility to Type 2 diabetes. In a further embodiment, at-risk markers alleles (i.e. conferring increased susceptibility) in linkage disequilibrium with one or more markers found to be associated with Type 2 diabetes are markers comprising one or more allele that is more frequently present in an individual at risk for Type 2 diabetes, compared to the frequency of their presence in controls, wherein the presence of the markers is indicative of increased susceptibility to Type 2 diabetes.

### Study Population

[0146] In a general sense, the methods and kits of the invention can be utilized from samples containing genomic DNA from any source, i.e. any individual. In preferred embodiments, the individual is a human individual. The individual can be an adult, child, or fetus. The present invention also provides for assessing markers and/or haplotypes in individuals who are members of a target population. Such a target population is in one embodiment a population or group of individuals at risk of developing the disease, based on other genetic factors, biomarkers, biophysical parameters (e.g., weight, BMD, blood pressure), or general health and/or lifestyle parameters (e.g., history of disease or related diseases, previous diagnosis of disease, family history of disease).

[0147] The invention provides for embodiments that include individuals from specific age subgroups, such as those over the age of 40, over age of 45, or over age of 50, 55, 60, 65, 70, 75, 80, or 85. Other embodiments of the invention pertain to other age groups, such as individuals aged less than 85, such as less than age 80, less than age 75, or less than age 70, 65, 60, 55, 50, 45, 40, 35, or age 30. Other embodiments relate to individuals with age at onset of the disease in any of the age ranges described in the above. It is also contemplated that a range of ages may be relevant in certain embodiments, such as age at onset at more than age 45 but less than age 60. Other age ranges are however also contemplated, including all age ranges bracketed by the age values listed in the above. The invention furthermore relates to individuals of either gender, males or females.

[0148] The Icelandic population is a Caucasian population of Northern European ancestry. A large number of studies reporting results of genetic linkage and association in the Icelandic population have been published in the last few years. Many of those studies show replication of variants, originally identified in the Icelandic population as being associating with a particular disease, in other populations (Stacey, S. N., et al., Nat Genet. May 27, 2007 (Epub ahead of print; Helgadottir, A., et al., Science 316:1491-93 (2007); Steinthorsdottir, V., et al., Nat Genet. 39:770-75 (2007); Gudmundsson, J., et al., Nat Genet. 39:631-37 (2007); Amundadottir, L. T., et al., Nat Genet. 38:652-58 (2006); Grant, S. F., et al., Nat Genet. 38:320-23 (2006)). Thus, genetic findings in the Icelandic population have in general been replicated in other populations, including populations from Africa and Asia. The variants described herein to be associated to the CDKAL gene, in particular the LD Block C06 (SEQ ID NO:1) have been replicated in several populations of European, American, and Chinese (Hong Kong) origin. This supports the belief that these variants (rs7756992 and markers in linkage disequilibrium therewith) are at-risk variants for Type 2 diabetes in most populations.

[0149] Particular embodiments comprising individual human populations are thus also contemplated and within the scope of the present invention. Such embodiments relate to human subjects that are from one or more human population including, but not limited to, Caucasian populations, European populations, American populations, Eurasian populations, Asian populations, Central/South Asian populations, East Asian populations, Middle Eastern populations, African populations, Hispanic populations, and Oceanian populations. European populations include, but are not limited to, Swedish, Norwegian, Finnish, Russian, Danish, Icelandic, Irish, Kelt, English, Scottish, Dutch, Belgian, French, German, Spanish, Portuguese, Italian, Polish, Bulgarian, Slavic, Serbian, Bosnian, Czech, Greek and Turkish populations. The invention furthermore in other embodiments can be practiced in specific human populations that include Bantu, Mandenk, Yoruba, San, Mbuti Pygmy, Orcadian, Adygel, Russian, Sardinian, Tuscan, Mozabite, Bedouin, Druze, Palestinian, Balochi, Brahui, Makrani, Sindhi, Pathan, Burusho, Hazara, Uygur, Kalash, Han, Dai, Daur, Hezhen, Lahu, Miao, Orogen, She, Tujia, Tu, Xibo, Yi, Mongolan, Naxi, Cambodian, Japanese, Yakut, Melanesian, Papuan, Karitianan, Surui, Columbian, Maya and Pima.

[0150] In one preferred embodiment, the invention relates to populations that include black African ancestry such as populations comprising persons of African descent or lineage. Black African ancestry may be determined by self reporting as African-Americans, Afro-Americans, Black Americans, being a member of the black race or being a member of the negro race. For example, African Americans or Black Americans are those persons living in North America and having origins in any of the black racial groups of Africa. In another example, self-reported persons of black African ancestry may have at least one parent of black African ancestry or at least one grandparent of black African ancestry.

[0151] The racial contribution in individual subjects may also be determined by genetic analysis. Genetic analysis of ancestry may be carried out using unlinked microsatellite markers such as those set out in Smith et al. (Am J Hum Genet 74, 1001-13 (2004)).

[0152] In certain embodiments, the invention relates to markers and/or haplotypes identified in specific populations, as described in the above. The person skilled in the art will appreciate that measures of linkage disequilibrium (LD) may give different results when applied to different populations. This is due to different population history of different human populations as well as differential selective pressures that may have led to differences in LD in specific genomic regions. It is also well known to the person skilled in the art that certain markers, e.g. SNP markers, have different population frequency in different populations, or are polymorphic in one population but not in another. The person skilled in the art will however apply the methods available and as thought herein to practice the present invention in any given human population. This may include assessment of polymorphic markers in the LD region of the present invention, so as to identify those markers that give strongest association within the specific population. Thus, the at-risk variants of the present invention may reside on different haplotype background and in different frequencies in various human populations. However, utilizing methods known in the art and the markers of the present invention, the invention can be practiced in any given human population.

### Utility of Genetic Testing

[0153] The knowledge about a genetic variant that confers a risk of developing Type 2 diabetes offers the opportunity to apply a genetic test to distinguish between individuals with increased risk of developing the disease (i.e. carriers of the at-risk variant) and those with decreased risk of developing the disease (i.e. carriers of the protective variant). The core values of genetic testing, for individuals belonging to both of the above mentioned groups, are the possibilities of being able to diagnose the disease at an early stage and provide information to the clinician about prognosis/aggressiveness of the disease in order to be able to apply the most appropriate treatment.

[0154] For example, the application of a genetic test for Type 2 diabetes can identify high risk individuals among people with impaired fasting glucose (IFG) or impaired glucose tolerance (IGT). It is well established that while around a third of people who are found to have IFG/IGT develop Type 2 diabetes, glucose levels return to normal for an equal proportion of individuals. Identification of individuals within this group that are carriers of genetic risk variants will allow targeting of those individuals by preventive measures. For example, these individuals may benefit from a closer monitoring of blood glucose levels to aid in early diagnosis. They may also need more stringent lifestyle intervention advice since individuals with certain genetic risk factors develop Type 2 diabetes at lower BMI levels than those without those factors.

[0155] Individuals with a family history of Type 2 diabetes and carriers of at-risk variants may benefit from genetic testing since the knowledge of the presence of a genetic risk factor, or evidence for increased risk of being a carrier of one or more risk factors, may provide increased incentive for implementing a healthier lifestyle. Furthermore, closer monitoring of glucose levels should be advised for such individuals, facilitating early diagnosis and/or preventative treatment.

[0156] Genetic testing of Type 2 diabetes patients may furthermore give valuable information about the primary cause of the disease and can aid the clinician in selecting the best treatment options and medication for each individual. For instance, patients with genetic risk factors for reduced insulin secretion may be likely to benefit from medication increasing insulin secretion while increasing insulin sensitivity in those individuals may be less effective.

### METHODS OF THE INVENTION

[0157] Methods for risk assessment of Type 2 diabetes are described herein and are encompassed by the invention. The invention also encompasses methods of assessing an individual for probability of response to a therapeutic agent for Type 2 diabetes, as well as methods for predicting the effectiveness of a therapeutic agent for Type 2 diabetes. Kits for assaying a sample from a subject to detect susceptibility to Type 2 diabetes are also encompassed by the invention.

### DIAGNOSTIC AND SCREENING ASSAYS OF THE INVENTION

[0158] In certain embodiments, the present invention pertains to methods of assessing risk or diagnosing, or aiding in risk assessment or diagnosis of, Type 2 diabetes or a susceptibility to Type 2 diabetes, by detecting particular alleles at genetic markers that appear more frequently in Type 2 diabetes subjects or subjects who are susceptible to Type 2 diabetes. In a particular embodiment, the invention is a method of assessing susceptibility to Type 2 diabetes by detecting at least one allele, of at least one polymorphic marker (e.g., the markers described herein). The present invention describes methods whereby detection of particular alleles of particular markers or haplotypes is indicative of a susceptibility to Type 2 diabetes. Such prognostic or predictive assays can also be used to determine prophylactic treatment of a subject prior to the onset of symptoms of Type 2 diabetes.

[0159] The present invention pertains in some embodiments to methods of clinical applications of diagnosis, e.g., diagnosis performed by a medical professional, which may include an assessment or determination of genetic risk variants. In other embodiments, the invention pertains to methods of risk assessment (or diagnosis) performed by a layman. Recent technological advances in genotyping technologies, including high-throughput genotyping of SNP markers, such as Molecular Inversion Probe array technology (e.g., Affymetrix GeneChip), and BeadArray Technologies (e.g., Illumina GoldenGate and Infinium assays) have made it possible for individuals to have their own genome assessed for up to one million SNPs. The resulting genotype information, made available to the individual can be compared to information from the public literature about disease or trait risk associated with various SNPs. The diagnostic application of disease-associated alleles as described herein, can thus be performed either by a health professional based on results of a clinical test or by a layman, including an individual providing service for performing an whole-genome assessment of SNPs. In other words, the diagnosis or assessment of a susceptibility based on genetic risk can be made by health professionals, genetic counselors, genotype services providers or by the layman, based on information about his/her genotype and publications on various risk factors. In the present context, the term “diagnosing”, and “diagnose a susceptibility”, is meant to refer to any available diagnostic method, including those mentioned above.

[0160] In addition, in certain other embodiments, the present invention pertains to methods of diagnosing, or aiding in the diagnosis of, a decreased susceptibility to Type 2 diabetes, by detecting particular genetic marker alleles or haplotypes that appear less frequently in Type 2 diabetes patients than in individual not diagnosed with Type 2 diabetes or in the general population.

[0161] As described and exemplified herein, particular marker alleles or haplotypes (e.g. the markers and haplotypes as listed in Tables 1-24, e.g., the markers and haplotypes as listed in Tables 1-6 and Tables 9-12, and markers in linkage disequilibrium therewith) are associated with Type 2 diabetes. In one embodiment, the marker allele or haplotype is one that confers a significant risk or susceptibility to Type 2 diabetes. In another embodiment, the invention relates to a method of diagnosing a susceptibility to Type 2 diabetes in a human individual, the method comprising determining the presence or absence of at least one allele of at least one polymorphic marker in a nucleic acid sample obtained from the individual, wherein the at least one polymorphic marker is selected from the group consisting of the polymorphic markers listed in Table 9, Table 10, Table 11, and Table 12, and markers in linkage disequilibrium (defined as r²>0.2) therewith. In another embodiment, the invention pertains to methods of diagnosing or assessing a susceptibility to Type 2 diabetes in a human individual, by screening for at least one marker allele or haplotype as listed in Tables 1-6 and 9-12, or markers in linkage disequilibrium therewith. In another embodiment, the marker allele or haplotype is more frequently present in a subject having, or who is susceptible to, Type 2 diabetes (affected), as compared to the frequency of its presence in a healthy subject (control, such as population controls). In certain embodiments, the significance of association of the at least one marker allele or haplotype is characterized by a p value<0.05. In other embodiments, the significance of association is characterized by smaller p-values, such as <0.01, <0.001, <0.0001, <0.00001, <0.000001, <0.0000001, <0.00000001 or <0.000000001.

[0162] In these embodiments, the presence of the at least one marker allele or haplotype is indicative of a susceptibility to Type 2 diabetes. These diagnostic methods involve detecting the presence or absence of at least one marker allele or haplotype that is associated with Type 2 diabetes. The haplotypes described herein include combinations of alleles at various genetic markers (e.g., SNPs, microsatellites). The detection of the particular genetic marker alleles that make up the particular haplotypes can be performed by a variety of methods described herein and/or known in the art. For example, genetic markers can be detected at the nucleic acid level (e.g., by direct nucleotide sequencing or by other means known to the skilled in the art) or at the amino acid level if the genetic marker affects the coding sequence of a protein encoded by a Type 2 diabetes-associated nucleic acid (e.g., by protein sequencing or by immunoassays using antibodies that recognize such a protein). The marker alleles or haplotypes of the present invention correspond to fragments of a genomic DNA sequence associated with Type 2 diabetes. Such fragments encompass the DNA sequence of the polymorphic marker or haplotype in question, but may also include DNA segments in strong LD (linkage disequilibrium) with the marker or haplotype (e.g., as determined by a value of r² greater than 0.2 and/or |D′|>0.8).

[0163] In one embodiment, diagnosis or assessment of a susceptibility to Type 2 diabetes can be accomplished using hybridization methods, such as Southern analysis, Northern analysis, and/or in situ hybridizations (see Current Protocols in Molecular Biology, Ausubel, F. et al., eds., John Wiley & Sons, including all supplements). The presence of a specific marker allele can be indicated by sequence-specific hybridization of a nucleic acid probe specific for the particular allele. The presence of more than specific marker allele or a specific haplotype can be indicated by using several sequence-specific nucleic acid probes, each being specific for a particular allele. In one embodiment, a haplotype can be indicated by a single nucleic acid probe that is specific for the specific haplotype (i.e., hybridizes specifically to a DNA strand comprising the specific marker alleles characteristic of the haplotype). A sequence-specific probe can be directed to hybridize to genomic DNA, RNA, or cDNA. A “nucleic acid probe”, as used herein, can be a DNA probe or an RNA probe that hybridizes to a complementary sequence. One of skill in the art would know how to design such a probe so that sequence specific hybridization will occur only if a particular allele is present in a genomic sequence from a test sample.

[0164] To diagnose a susceptibility to Type 2 diabetes, a hybridization sample is formed by contacting the test sample containing an Type 2 diabetes-associated nucleic acid, such as a genomic DNA sample, with at least one nucleic acid probe. A non-limiting example of a probe for detecting mRNA or genomic DNA is a labeled nucleic acid probe that is capable of hybridizing to mRNA or genomic DNA sequences described herein. The nucleic acid probe can be, for example, a full-length nucleic acid molecule, or a portion thereof, such as an oligonucleotide of at least 15, 30, 50, 100, 250 or 500 nucleotides in length that is sufficient to specifically hybridize under stringent conditions to appropriate mRNA or genomic DNA. For example, the nucleic acid probe can comprise all or a portion of the nucleotide sequence of LD Block C06 (SEQ ID NO:1), LD Block C10 (SEQ ID NO:2) (e.g., the nucleotide sequence encoding the IDE, KIF11 and/or the HHEX genes), LD Block C17 (SEQ ID NO:3) or the CDKAL1 gene, or the SLC30A8 gene, as described herein, optionally comprising at least one allele of a marker described herein, or at least one haplotype described herein, or the probe can be the complementary sequence of such a sequence. In a particular embodiment, the nucleic acid probe is a portion of the nucleotide sequence of LD Block C06 (SEQ ID NO:1), LD Block C10 (SEQ ID NO:2) (e.g., the nucleotide sequence encoding the IDE, KIF11 and/or the HHEX genes), LD Block C17 (SEQ ID NO:3) or the CDKAL1 gene, or the SLC30A8 gene as described herein, optionally comprising at least one allele of a marker described herein, or at least one allele contained in the haplotypes described herein, or the probe can be the complementary sequence of such a sequence. Other suitable probes for use in the diagnostic assays of the invention are described herein. Hybridization can be performed by methods well known to the person skilled in the art (see, e.g., Current Protocols in Molecular Biology, Ausubel, F. et al., eds., John Wiley & Sons, including all supplements). In one embodiment, hybridization refers to specific hybridization, i.e., hybridization with no mismatches (exact hybridization). In one embodiment, the hybridization conditions for specific hybridization are high stringency.

[0165] Specific hybridization, if present, is detected using standard methods. If specific hybridization occurs between the nucleic acid probe and the nucleic acid in the test sample, then the sample contains the allele that is complementary to the nucleotide that is present in the nucleic acid probe. The process can be repeated for any markers of the present invention, or markers that make up a haplotype of the present invention, or multiple probes can be used concurrently to detect more than one marker alleles at a time. It is also possible to design a single probe containing more than one marker alleles of a particular haplotype (e.g., a probe containing alleles complementary to 2, 3, 4, 5 or all of the markers that make up a particular haplotype). Detection of the particular markers of the haplotype in the sample is indicative that the source of the sample has the particular haplotype (e.g., a haplotype) and therefore is susceptible to DISEASE.

[0166] In one preferred embodiment, a method utilizing a detection oligonucleotide probe comprising a fluorescent moiety or group at its 3′ terminus and a quencher at its 5′ terminus, and an enhancer oligonucleotide, is employed, as described by Kutyavin et al. (Nucleic Acid Res. 34:e128 (2006)). The fluorescent moiety can be Gig Harbor Green or Yakima Yellow, or other suitable fluorescent moieties. The detection probe is designed to hybridize to a short nucleotide sequence that includes the SNP polymorphism to be detected. Preferably, the SNP is anywhere from the terminal residue to −6 residues from the 3′ end of the detection probe. The enhancer is a short oligonucleotide probe which hybridizes to the DNA template 3′ relative to the detection probe. The probes are designed such that a single nucleotide gap exists between the detection probe and the enhancer nucleotide probe when both are bound to the template. The gap creates a synthetic abasic site that is recognized by an endonuclease, such as Endonuclease IV. The enzyme cleaves the dye off the fully complementary detection probe, but cannot cleave a detection probe containing a mismatch. Thus, by measuring the fluorescence of the released fluorescent moiety, assessment of the presence of a particular allele defined by nucleotide sequence of the detection probe can be performed.

[0167] The detection probe can be of any suitable size, although preferably the probe is relatively short. In one embodiment, the probe is from 5-100 nucleotides in length. In another embodiment, the probe is from 10-50 nucleotides in length, and in another embodiment, the probe is from 12-30 nucleotides in length. Other lengths of the probe are possible and within scope of the skill of the average person skilled in the art. In a preferred embodiment, the DNA template containing the SNP polymorphism is amplified by Polymerase Chain Reaction (PCR) prior to detection. In such an embodiment, the amplified DNA serves as the template for the detection probe and the enhancer probe.

[0168] Certain embodiments of the detection probe, the enhancer probe, and/or the primers used for amplification of the template by PCR include the use of modified bases, including modified A and modified G. The use of modified bases can be useful for adjusting the melting temperature of the nucleotide molecule (probe and/or primer) to the template DNA, for example for increasing the melting temperature in regions containing a low percentage of G or C bases, in which modified A with the capability of forming three hydrogen bonds to its complementary T can be used, or for decreasing the melting temperature in regions containing a high percentage of G or C bases, for example by using modified G bases that form only two hydrogen bonds to their complementary C base in a double stranded DNA molecule. In a preferred embodiment, modified bases are used in the design of the detection nucleotide probe. Any modified base known to the skilled person can be selected in these methods, and the selection of suitable bases is well within the scope of the skilled person based on the teachings herein and known bases available from commercial sources as known to the skilled person.

[0169] In another hybridization method, Northern analysis (see Current Protocols in Molecular Biology, Ausubel, F. et al., eds., John Wiley & Sons, supra) is used to identify the presence of a polymorphism associated with Type 2 diabetes. For Northern analysis, a test sample of RNA is obtained from the subject by appropriate means. As described herein, specific hybridization of a nucleic acid probe to RNA from the subject is indicative of a particular allele complementary to the probe. For representative examples of use of nucleic acid probes, see, for example, U.S. Pat. Nos. 5,288,611 and 4,851,330.

[0170] Additionally, or alternatively, a peptide nucleic acid (PNA) probe can be used in addition to, or instead of, a nucleic acid probe in the hybridization methods described herein. A PNA is a DNA mimic having a peptide-like, inorganic backbone, such as N-(2-aminoethyl)glycine units, with an organic base (A, G, C, T or U) attached to the glycine nitrogen via a methylene carbonyl linker (see, for example, Nielsen, P., et al., Bioconjug. Chem. 5:3-7 (1994)). The PNA probe can be designed to specifically hybridize to a molecule in a sample suspected of containing one or more of the marker alleles or haplotypes that are associated with Type 2 diabetes. Hybridization of the PNA probe is thus diagnostic for Type 2 diabetes or a susceptibility to Type 2 diabetes.

[0171] In one embodiment of the methods of the invention, diagnosis of Type 2 diabetes or a susceptibility to Type 2 diabetes is accomplished through enzymatic amplification of a nucleic acid from the subject. For example, a test sample containing genomic DNA can be obtained from the subject and the polymerase chain reaction (PCR) can be used to amplify a fragment comprising one or more markers or haplotypes of the present invention found to be associated with Type 2 diabetes. As described herein, identification of a particular marker allele or haplotype associated with Type 2 diabetes can be accomplished using a variety of methods (e.g., sequence analysis, analysis by restriction digestion, specific hybridization, single stranded conformation polymorphism assays (SSCP), electrophoretic analysis, etc.). In another embodiment, diagnosis is accomplished by expression analysis using quantitative PCR (kinetic thermal cycling). This technique can, for example, utilize commercially available technologies, such as TaqMan® (Applied Biosystems, Foster City, Calif.), to allow the identification of polymorphisms and haplotypes. The technique can assess the presence of an alteration in the expression or composition of a polypeptide or splicing variant(s) that is encoded by a Type 2 diabetes-associated nucleic acid. Further, the expression of the variant(s) can be quantified as physically or functionally different.

[0172] In another embodiment of the methods of the invention, analysis by restriction digestion can be used to detect a particular allele if the allele results in the creation or elimination of a restriction site relative to a reference sequence. A test sample containing genomic DNA is obtained from the subject. PCR can be used to amplify particular regions that are associated with Type 2 diabetes (e.g. the polymorphic markers and haplotypes of Tables 1-21, e.g., the polymorphic markers and haplotypes of Tables 1-6 and Tables 9-12, and markers in linkage disequilibrium therewith) nucleic acid in the test sample from the test subject. Restriction fragment length polymorphism (RFLP) analysis can be conducted, e.g., as described in Current Protocols in Molecular Biology, supra. The digestion pattern of the relevant DNA fragment indicates the presence or absence of the particular allele in the sample.

[0173] Sequence analysis can also be used to detect specific alleles at polymorphic sites associated with Type 2 diabetes (e.g. the polymorphic markers and haplotypes of Tables 1-24, e.g., the polymorphic markers and haplotypes of Tables 1-6 and Tables 9-12, and markers in linkage disequilibrium therewith, e.g., the markers set forth in Tables 22, 23 and 24). Therefore, in one embodiment, determination of the presence or absence of a particular marker alleles or haplotypes comprises sequence analysis. For example, a test sample of DNA or RNA can be obtained from the test subject. PCR or other appropriate methods can be used to amplify a portion of a Type 2 diabetes-associated nucleic acid, and the presence of a specific allele can then be detected directly by sequencing the polymorphic site (or multiple polymorphic sites) of the genomic DNA in the sample.

[0174] Allele-specific oligonucleotides can also be used to detect the presence of a particular allele at a Type 2 diabetes-associated nucleic acid (e.g. the polymorphic markers and haplotypes of Tables 1-21, e.g., the polymorphic markers and haplotypes of Tables 1-6 and Tables 9-12, and markers in linkage disequilibrium therewith), through the use of dot-blot hybridization of amplified oligonucleotides with allele-specific oligonucleotide (ASO) probes (see, for example, Saiki, R. et al., Nature, 324:163-166 (1986)). An “allele-specific oligonucleotide” (also referred to herein as an “allele-specific oligonucleotide probe”) is an oligonucleotide of approximately 10-50 base pairs or approximately 15-30 base pairs, that specifically hybridizes to a Type 2 diabetes-associated nucleic acid, and which contains a specific allele at a polymorphic site (e.g., a polymorphism described herein). An allele-specific oligonucleotide probe that is specific for one or more particular a Type 2 diabetes-associated nucleic acid can be prepared using standard methods (see, e.g., Current Protocols in Molecular Biology, supra). PCR can be used to amplify the desired region a Type 2 diabetes-associated nucleic acid. The DNA containing the amplified region can be dot-blotted using standard methods (see, e.g., Current Protocols in Molecular Biology, supra), and the blot can be contacted with the oligonucleotide probe. The presence of specific hybridization of the probe to the amplified region can then be detected. Specific hybridization of an allele-specific oligonucleotide probe to DNA from the subject is indicative of a specific allele at a polymorphic site associated with Type 2 diabetes (see, e.g., Gibbs, R. et al., Nucleic Acids Res., 17:2437-2448 (1989) and WO 93/22456).

[0175] In another embodiment, arrays of oligonucleotide probes that are complementary to target nucleic acid sequence segments from a subject, can be used to identify polymorphisms in a Type 2 diabetes-associated nucleic acid (e.g. the polymorphic markers and haplotypes of Tables 1-24, e.g. the polymorphic markers and haplotypes of Tables 1-6 and Tables 9-12, and markers in linkage disequilibrium therewith). For example, an oligonucleotide array can be used. Oligonucleotide arrays typically comprise a plurality of different oligonucleotide probes that are coupled to a surface of a substrate in different known locations. These oligonucleotide arrays, also described as “Genechips™,” have been generally described in the art (see, e.g., U.S. Pat. No. 5,143,854, PCT Patent Publication Nos. WO 90/15070 and 92/10092). These arrays can generally be produced using mechanical synthesis methods or light directed synthesis methods that incorporate a combination of photolithographic methods and solid phase oligonucleotide synthesis methods (Fodor, S. et al., Science, 251:767-773 (1991); Pirrung et al., U.S. Pat. No. 5,143,854 (see also published PCT Application No. WO 90/15070); and Fodor. S. et al., published PCT Application No. WO 92/10092 and U.S. Pat. No. 5,424,186, the entire teachings of each of which are incorporated by reference herein). Techniques for the synthesis of these arrays using mechanical synthesis methods are described in, e.g., U.S. Pat. No. 5,384,261; the entire teachings of which are incorporated by reference herein. In another example, linear arrays can be utilized.

[0176] Additional descriptions of use of oligonucleotide arrays for detection of polymorphisms can be found, for example, in U.S. Pat. Nos. 5,858,659 and 5,837,832, the entire teachings of both of which are incorporated by reference herein. Other methods of nucleic acid analysis can be used to detect a particular allele at a polymorphic site associated with Type 2 diabetes (e.g. the polymorphic markers and haplotypes of Tables 1-24, e.g. the polymorphic markers and haplotypes of Tables 1-6 and Tables 9-12, and markers in linkage disequilibrium therewith). Representative methods include, for example, direct manual sequencing (Church and Gilbert, Proc. Natl. Acad. Sci. USA, 81: 1991-1995 (1988); Sanger, F., et al., Proc. Natl. Acad. Sci. USA, 74:5463-5467 (1977); Beavis, et al., U.S. Pat. No. 5,288,644); automated fluorescent sequencing; single-stranded conformation polymorphism assays (SSCP); clamped denaturing gel electrophoresis (CDGE); denaturing gradient gel electrophoresis (DGGE) (Sheffield, V., et al., Proc. Natl. Acad. Sci. USA, 86:232-236 (1989)), mobility shift analysis (Orita, M., et al., Proc. Natl. Acad. Sci. USA, 86:2766-2770 (1989)), restriction enzyme analysis (Flavell, R., et al., Cell, 15:25-41 (1978); Geever, R., et al., Proc. Natl. Acad. Sci. USA, 78:5081-5085 (1981)); heteroduplex analysis; chemical mismatch cleavage (CMC) (Cotton, R., et al., Proc. Natl. Acad. Sci. USA, 85:4397-4401 (1985)); RNase protection assays (Myers, R., et al., Science, 230:1242-1246 (1985); use of polypeptides that recognize nucleotide mismatches, such as E. coli mutS protein; and allele-specific PCR.

[0177] In another embodiment of the invention, diagnosis of Type 2 diabetes or a susceptibility to Type 2 diabetes can be made by examining expression and/or composition of a polypeptide encoded by Type 2 diabetes-associated nucleic acid in those instances where the genetic marker(s) or haplotype(s) of the present invention result in a change in the composition or expression of the polypeptide. Thus, diagnosis of a susceptibility to Type 2 diabetes can be made by examining expression and/or composition of one of these polypeptides, or another polypeptide encoded by a Type 2 diabetes-associated nucleic acid, in those instances where the genetic marker or haplotype of the present invention results in a change in the composition or expression of the polypeptide. The haplotypes and markers of the present invention that show association to Type 2 diabetes may play a role through their effect on one or more of these nearby genes. Possible mechanisms affecting these genes include, e.g., effects on transcription, effects on RNA splicing, alterations in relative amounts of alternative splice forms of mRNA, effects on RNA stability, effects on transport from the nucleus to cytoplasm, and effects on the efficiency and accuracy of translation.

[0178] A variety of methods can be used to make such a detection, including enzyme linked immunosorbent assays (ELISA), Western blots, immunoprecipitation and immunofluorescence. A test sample from a subject is assessed for the presence of an alteration in the expression and/or an alteration in composition of the polypeptide encoded by a Type 2 diabetes-associated nucleic acid. An alteration in expression of a polypeptide encoded by a Type 2 diabetes-associated nucleic acid can be, for example, an alteration in the quantitative polypeptide expression (i.e., the amount of polypeptide produced). An alteration in the composition of a polypeptide encoded by a Type 2 diabetes-associated nucleic acid is an alteration in the qualitative polypeptide expression (e.g., expression of a mutant polypeptide or of a different splicing variant). In one embodiment, diagnosis of a susceptibility to Type 2 diabetes is made by detecting a particular splicing variant encoded by a Type 2 diabetes-associated nucleic acid, or a particular pattern of splicing variants.

[0179] Both such alterations (quantitative and qualitative) can also be present. An “alteration” in the polypeptide expression or composition, as used herein, refers to an alteration in expression or composition in a test sample, as compared to the expression or composition of polypeptide encoded by a Type 2 diabetes-associated nucleic acid in a control sample. A control sample is a sample that corresponds to the test sample (e.g., is from the same type of cells), and is from a subject who is not affected by, and/or who does not have a susceptibility to, Type 2 diabetes (e.g., a subject that does not possess a marker allele or haplotype as described herein). Similarly, the presence of one or more different splicing variants in the test sample, or the presence of significantly different amounts of different splicing variants in the test sample, as compared with the control sample, can be indicative of a susceptibility to Type 2 diabetes. An alteration in the expression or composition of the polypeptide in the test sample, as compared with the control sample, can be indicative of a specific allele in the instance where the allele alters a splice site relative to the reference in the control sample. Various means of examining expression or composition of a polypeptide encoded by a Type 2 diabetes-associated nucleic acid can be used, including spectroscopy, colorimetry, electrophoresis, isoelectric focusing, and immunoassays (e.g., David et al., U.S. Pat. No. 4,376,110) such as immunoblotting (see, e.g., Current Protocols in Molecular Biology, particularly chapter 10, supra).

[0180] For example, in one embodiment, an antibody (e.g., an antibody with a detectable label) that is capable of binding to a polypeptide encoded by a Type 2 diabetes-associated nucleic acid can be used. Antibodies can be polyclonal or monoclonal. An intact antibody, or a fragment thereof (e.g., Fv, Fab, Fab′, F(ab′)₂) can be used. The term “labeled”, with regard to the probe or antibody, is intended to encompass direct labeling of the probe or antibody by coupling (i.e., physically linking) a detectable substance to the probe or antibody, as well as indirect labeling of the probe or antibody by reactivity with another reagent that is directly labeled. Examples of indirect labeling include detection of a primary antibody using a labeled secondary antibody (e.g., a fluorescently-labeled secondary antibody) and end-labeling of a DNA probe with biotin such that it can be detected with fluorescently-labeled streptavidin.

[0181] In one embodiment of this method, the level or amount of polypeptide encoded by a Type 2 diabetes-associated nucleic acid in a test sample is compared with the level or amount of the polypeptide encoded by a Type 2 diabetes-associated nucleic acid in a control sample. A level or amount of the polypeptide in the test sample that is higher or lower than the level or amount of the polypeptide in the control sample, such that the difference is statistically significant, is indicative of an alteration in the expression of the polypeptide encoded by the Type 2 diabetes-associated nucleic acid, and is diagnostic for a particular allele or haplotype responsible for causing the difference in expression. Alternatively, the composition of the polypeptide encoded by a Type 2 diabetes-associated nucleic acid in a test sample is compared with the composition of the polypeptide encoded by a Type 2 diabetes-associated nucleic acid in a control sample. In another embodiment, both the level or amount and the composition of the polypeptide can be assessed in the test sample and in the control sample.

[0182] In another embodiment, the diagnosis of a susceptibility to Type 2 diabetes is made by detecting at least one Type 2 diabetes-associated marker allele or haplotype (e.g., associated alleles or haplotypes of the markers listed in Tables 1-21, such as Tables 1-6 and Tables 9-12), in combination with an additional protein-based, RNA-based or DNA-based assay. The methods of the invention can also be used in combination with an analysis of a subject's family history and risk factors (e.g., environmental risk factors, lifestyle risk factors).

### Kits

[0183] Kits useful in the methods of the invention comprise components useful in any of the methods described herein, including for example, primers for nucleic acid amplification, hybridization probes, restriction enzymes (e.g., for RFLP analysis), allele-specific oligonucleotides, antibodies that bind to an altered polypeptide encoded by a nucleic acid of the invention as described herein (e.g., a genomic segment comprising at least one polymorphic marker and/or haplotype of the present invention) or to a non-altered (native) polypeptide encoded by a nucleic acid of the invention as described herein, means for amplification of a nucleic acid associated with Type 2 diabetes, means for analyzing the nucleic acid sequence of a nucleic acid associated with Type 2 diabetes, means for analyzing the amino acid sequence of a polypeptide encoded by a nucleic acid associated with Type 2 diabetes (e.g., the Type 2 diabetes protein encoded by the Type 2 diabetes gene), etc. The kits can for example include necessary buffers, nucleic acid primers for amplifying nucleic acids of the invention (e.g., a nucleic acid segment comprising one or more of the polymorphic markers as described herein), and reagents for allele-specific detection of the fragments amplified using such primers and necessary enzymes (e.g., DNA polymerase). Additionally, kits can provide reagents for assays to be used in combination with the methods of the present invention, e.g., reagents for use with other Type 2 diabetes diagnostic assays.

[0184] In one embodiment, the invention is a kit for assaying a sample from a subject to detect the presence of Type 2 diabetes, symptoms associated with Type 2 diabetes, or a susceptibility to Type 2 diabetes in a subject, wherein the kit comprises reagents necessary for selectively detecting at least one allele of at least one polymorphism of the present invention in the genome of the individual. In a particular embodiment, the reagents comprise at least one contiguous oligonucleotide that hybridizes to a fragment of the genome of the individual comprising at least one polymorphism of the present invention. In another embodiment, the reagents comprise at least one pair of oligonucleotides that hybridize to opposite strands of a genomic segment obtained from a subject, wherein each oligonucleotide primer pair is designed to selectively amplify a fragment of the genome of the individual that includes at least one polymorphism, wherein the polymorphism is selected from the group consisting of the polymorphisms as listed in Tables 1-6 and 9-12, and polymorphic markers in linkage disequilibrium therewith (e.g., the markers set forth in Tables 22, 23 and 24). In yet another embodiment the fragment is at least 20 base pairs in size. Such oligonucleotides or nucleic acids (e.g., oligonucleotide primers) can be designed using portions of the nucleic acid sequence flanking polymorphisms (e.g., SNPs or microsatellites) that are indicative of Type 2 diabetes. In another embodiment, the kit comprises one or more labeled nucleic acids capable of allele-specific detection of one or more specific polymorphic markers or haplotypes associated with Type 2 diabetes, and reagents for detection of the label. Suitable labels include, e.g., a radioisotope, a fluorescent label, an enzyme label, an enzyme co-factor label, a magnetic label, a spin label, an epitope label.

[0185] In particular embodiments, the polymorphic marker or haplotype to be detected by the reagents of the kit comprises one or more markers, two or more markers, three or more markers, four or more markers or five or more markers selected from the group consisting of the markers set forth in Tables 9-12. In another embodiment, the marker or haplotype to be detected comprises the markers set forth in Tables 22-24. In another embodiment, the marker or haplotype to be detected comprises markers rs2497304 (SEQ ID NO:16), rs947591 (SEQ ID NO:30), rs10882091 (SEQ ID NO:4), rs7914814 (SEQ ID NO:24), rs6583830 (SEQ ID NO:20), rs2421943 (SEQ ID NO:15), rs6583826 (SEQ ID NO:19), rs7752906 (SEQ ID NO:32), rs1569699 (SEQ ID NO:6), rs7756992 (SEQ ID NO:21), rs9350271 (SEQ ID NO:33), rs9356744 (SEQ ID NO:34), rs9368222 (SEQ ID NO:35), rs10440833 (SEQ ID NO:36), rs6931514 (SEQ ID NO:37), rs1860316 (SEQ ID NO:10), rs1981647 (SEQ ID NO:11), rs1843622 (SEQ ID NO:9), rs2191113 (SEQ ID NO:13), and rs9890889 (SEQ ID NO:31), and markers in linkage disequilibrium therewith. In one such embodiment, linkage disequilibrium is defined by values of r² greater than 0.2.

[0186] In one preferred embodiment, the kit for detecting the markers of the invention comprises a detection oligonucleotide probe, that hybridizes to a segment of template DNA containing a SNP polymorphisms to be detected, an enhancer oligonucleotide probe and an endonuclease. As explained in the above, the detection oligonucleotide probe comprises a fluorescent moiety or group at its 3′ terminus and a quencher at its 5′ terminus, and an enhancer oligonucleotide, is employed, as described by Kutyavin et al. (Nucleic Acid Res. 34:e128 (2006)). The fluorescent moiety can be Gig Harbor Green or Yakima Yellow, or other suitable fluorescent moieties. The detection probe is designed to hybridize to a short nucleotide sequence that includes the SNP polymorphism to be detected. Preferably, the SNP is anywhere from the terminal residue to −6 residues from the 3′ end of the detection probe. The enhancer is a short oligonucleotide probe which hybridizes to the DNA template 3′ relative to the detection probe. The probes are designed such that a single nucleotide gap exists between the detection probe and the enhancer nucleotide probe when both are bound to the template. The gap creates a synthetic abasic site that is recognized by an endonuclease, such as Endonuclease IV. The enzyme cleaves the dye off the fully complementary detection probe, but cannot cleave a detection probe containing a mismatch. Thus, by measuring the fluorescence of the released fluorescent moiety, assessment of the presence of a particular allele defined by nucleotide sequence of the detection probe can be performed.

[0187] The detection probe can be of any suitable size, although preferably the probe is relatively short. In one embodiment, the probe is from 5-100 nucleotides in length. In another embodiment, the probe is from 10-50 nucleotides in length, and in another embodiment, the probe is from 12-30 nucleotides in length. Other lengths of the probe are possible and within scope of the skill of the average person skilled in the art.

[0188] In a preferred embodiment, the DNA template containing the SNP polymorphism is amplified by Polymerase Chain Reaction (PCR) prior to detection, and primers for such amplification are included in the reagent kit. In such an embodiment, the amplified DNA serves as the template for the detection probe and the enhancer probe.

[0189] Certain embodiments of the detection probe, the enhancer probe, and/or the primers used for amplification of the template by PCR include the use of modified bases, including modified A and modified G. The use of modified bases can be useful for adjusting the melting temperature of the nucleotide molecule (probe and/or primer) to the template DNA, for example for increasing the melting temperature in regions containing a low percentage of G or C bases, in which modified A with the capability of forming three hydrogen bonds to its complementary T can be used, or for decreasing the melting temperature in regions containing a high percentage of G or C bases, for example by using modified G bases that form only two hydrogen bonds to their complementary C base in a double stranded DNA molecule. In a preferred embodiment, modified bases are used in the design of the detection nucleotide probe. Any modified base known to the skilled person can be selected in these methods, and the selection of suitable bases is well within the scope of the skilled person based on the teachings herein and known bases available from commercial sources as known to the skilled person.

[0190] In one such embodiments, the presence of the marker or haplotype is indicative of a susceptibility (increased susceptibility or decreased susceptibility) to Type 2 diabetes. In another embodiment, the presence of the marker or haplotype is indicative of response to a Type 2 diabetes therapeutic-agent. In another embodiment, the presence of the marker or haplotype is indicative of prognosis of Type 2 diabetes. In yet another embodiment, the presence of the marker or haplotype is indicative of progress of treatment of Type 2 diabetes. Such treatment may include intervention by surgery, medication or by other means (e.g., lifestyle changes).

### Therapeutic Agents for Type 2 Diabetes

[0191] Currently available Type 2 diabetes medication (apart from insulin) falls into six main classes of drugs: sulfonylureas, meglitinides, biguanides, thiazolidinediones, alpha-glucosidase inhibitors and a new class of drugs called DPP-4 inhibitors. These classes of drugs work in different ways to lower blood glucose levels.

1. Sulfonylureas. Sulfonylureas stimulate the beta cells of the pancreas to release more insulin.
2. Meglitinides. Meglitinides are drugs that also stimulate the beta cells to release insulin.
3. Biguanides. Biguanides lower blood glucose levels primarily by decreasing the amount of glucose produced by the liver. Metformin also helps to lower blood glucose levels by making muscle tissue more sensitive to insulin so glucose can be absorbed.
4. Thiazolidinediones. These drugs help insulin work better in the muscle and fat and also reduce glucose production in the liver.
5. Alpha-glucosidase inhibitors. These drugs help the body to lower blood glucose levels by blocking the breakdown of starches, such as bread, potatoes, and pasta in the intestine. They also slow the breakdown of some sugars, such as table sugar. Their action slows the rise in blood glucose levels after a meal. They should be taken with the first bite of a meal.
6. DPP-4 Inhibitors. A new class of medications called DPP-4 inhibitors help improve A1C without causing hypoglycemia. They work by preventing the breakdown of a naturally occurring compound in the body, GLP-1. GLP-1 reduces blood glucose levels in the body, but is broken down very quickly so it does not work well when injected as a drug itself. By interfering in the process that breaks down GLP-1, DPP-4 inhibitors allow it to remain active in the body longer, lowering blood glucose levels only when they are elevated.

[0192] Examples of available drugs in these classes are listed in Agent Table 1.

AGENT TABLE 1

| Drug Class | Generic name | Brand name |
|---|---|---|
| Biguanides | metformin | Glucophage, |
| | | Glucophage XR, |
| | | Glycon |
| | metformin plus | Glucovance |
| | glyburide | |
| Thiazolidinediones | pioglitazone | Actos |
| | rosiglitazone | Avandia |
| Sulfonylureas | acetohexamide | Dymelor |
| | chlorpropamide | Diabinese |
| | gliclazide Diamicron | Diamicron MR |
| | glimepiride | Amaryl |
| | glipizide | Glucotrol, Glucotrol XL |
| | glyburide | Micronase, DiaBeta, |
| | | Glynase PresTab |
| | glyburide plus metformin | Glucovance |
| | tolazamide | Tolinase |
| | tolbutamide | Orinase, Tol-Tab |
| Meglitinides | nateglinide | Starlix |
| | repaglinide | Prandin, Gluconorm |
| Alpha-glucosidase | acarbose | Precose, Prandase |
| inhibitors | | |
| | miglitol | Glyset |
| DPP-4 Inhibitors | sitagliptin | Januvia |

[0193] Additionally, a combination therapy comprising Biguanide and Sulphonylureas has bee used for treatment of Type 2 diabetes.

[0194] Additional Type 2 diabetes drugs are listed Agent Table 2.

AGENT TABLE 2

| | Compound name (generated using | | | |
|---|---|---|---|---|
| Compound | Autonom, ISIS Draw version 2.5 | | Compound | |
| name(s) | from MDL Information Systems) | Company | Reference | Indications |
| AR-0133418 | 1-(4-Methoxy-benzyl)-3-(5- | AstraZeneca | | AD |
| (SN-4521) | nitro-thiazol-2-yl)-urea | | | |
| AR-025028 | NSD | AstraZeneca | | |
| CT-98023 | N-[4-(2,4-Dichloro-phenyl)-5- | Chiron Corp | | non-insulin |
| | (1H-imidazol-2-yl)-pyrimidin- | | | dependent diabetes |
| | 2-yl]-N′-(5-nitro-pyridin-2-yl)- | | | |
| | ethane-1,2-diamine | | | |
| CT-20026 | NSD | Chiron Corp | Wagman et al., | non-insulin |
| | | | Curr Pharm. Des | dependent diabetes |
| | | | 2004: 10(10) | |
| | | | 1105-37 | |
| CT-21022 | NSD | Chiron Corp | | non-insulin |
| | | | | dependent diabetes |
| CT-20014 | NSD | Chiron Corp | | non-insulin |
| | | | | dependent diabetes |
| CT-21018 | NSD | Chiron Corp | | non-insulin |
| | | | | dependent diabetes |
| CHIR-98025 | NSD | Chiron Corp | | non-insulin |
| | | | | dependent diabetes |
| CHIR-99021 | NSD | Chiron Corp | Wagman et al., | non-insulin |
| | | | Curr Pharm. Des | dependent diabetes |
| | | | 2004: 10(10) | |
| | | | 1105-37 | |
| CG-100179 | NSD | CrystalGenomics | WO-2004065370 | diabetes mellitus |
| | | and Yuyu | | (Korea) |
| | 4-[2-(4-Dimethylamino-3- | Cyclacel Ltd. | | non-insulin |
| | nitro-phenylamino)-pyrimidin- | | | dependent diabetes, |
| | 4-yl]-3,5-dimethyl-1H- | | | among others. |
| | pyrrole-2-carbonitrile | | | |
| NP-01139, | 4-Benzyl-2-methyl- | Neuropharma SA | | CNS disorders, AD |
| NP-031112, | [1,2,4]thiadiazolidine-3,5- | | | |
| NP-03112, | dione | | | |
| NP-00361 | | | | |
| | 3-[9-Fluoro-2-(piperidine-1- | Eli Lilly & Co | | non-insulin |
| | carbonyl)-1,2,3,4-tetrahydro- | | | dependent diabetes |
| | [1,4]diazepino[6,7,1-hi]indol- | | | |
| | 7-yl]-4-imidazo[1,2-a]pyridin- | | | |
| | 3-yl-pyrrole-2,5-dione | | | |
| GW-784752x, | Cyclopentanecarboxylic acid | GSK | WO-03024447 | non-insulin |
| GW-784775, | (6-pyridin-3-yl-furo[2,3- | | (compound | dependent diabetes, |
| SB-216763, | d]pyrimidin-4-yl)-amide | | referenced: 4- | neurodegenerative |
| SB-415286 | | | [2-(2- | disease |
| | | | bromophenyl)-4- | |
| | | | (4-fluorophenyl)- | |
| | | | 1H-imidazol-5- | |
| | | | yl]pyridine | |
| NNC-57-0511, | 1-(4-Amino-furazan-3-yl)-5- | Novo Nordisk | | non-insulin |
| NNC-57-0545, | piperidin-1-ylmethyl-1H- | | | dependent diabetes, |
| NNC-57-0588 | [1,2,3]triazole-4-carboxylic | | | |
| | acid[1-pyridin-4-yl-meth-(E)- | | | |
| | ylidene]-hydrazide | | | |
| CP-70949 | NSD | Pfizer | | Hypoglycemic agent |
| VX-608 | NSD | | | Cerebrovascular |
| | | | | ischemia, non-insulin |
| | | | | dependent diabetes |
| KP-403 | NSD | Kinetek | | Nuclear factor kappa |
| class | | | | B modulator, Anti- |
| | | | | inflammatory, Cell |
| | | | | cycle inhibitor, |
| | | | | Glycogen synthase |
| | | | | kinase-3 beta |
| | | | | inhibitor |
| BYETTA | Exenatide: C₁₈₄H₂₈₂N₅₀O₆₀S - | Amylin/Eli Lilly | | non-insulin |
| (exenatide) | Amino acid sequence: H-His- | & Co | | dependent diabetes |
| | Gly-Glu-Gly-Thr-Phe-Thr- | | | |
| | Ser-Asp-Leu-Ser-Lys-Gln- | | | |
| | Met-Glu-Glu-Glu-Ala-Val- | | | |
| | Arg-Leu-Phe-Ile-Glu-Trp- | | | |
| | Leu-Lys-Asn-Gly-Gly-Pro- | | | |
| | Ser-Ser-Gly-Ala-Pro-Pro- | | | |
| | Pro-Ser-NH₂ | | | |
| Vildagliptin | NSD | Novartis | | non-insulin |
| (LAF237) | | | | dependent diabetes - |
| | | | | DPP-4 inhibitor |

### Therapeutic Agents of the Invention

[0195] Variants of the present invention (e.g., the markers and/or haplotypes as described herein) can be used to identify novel therapeutic targets for Type 2 diabetes. For example, genes containing, or in linkage disequilibrium with, variants (markers and/or haplotypes) associated with Type 2 diabetes, or their products, as well as genes or their products that are directly or indirectly regulated by or interact with these variant genes or their products, can be targeted for the development of therapeutic agents to treat Type 2 diabetes, or prevent or delay onset of symptoms associated with Type 2 diabetes. Therapeutic agents may comprise one or more of, for example, small non-protein and non-nucleic acid molecules, proteins, peptides, protein fragments, nucleic acids (DNA, RNA), PNA (peptide nucleic acids), or their derivatives or mimetics which can modulate the function and/or levels of the target genes or their gene products.

[0196] The nucleic acids and/or variants of the invention, or nucleic acids comprising their complementary sequence, may be used as antisense constructs to control gene expression in cells, tissues or organs. The methodology associated with antisense techniques is well known to the skilled artisan, and is described and reviewed in Antisense Drug Technology: Principles, Strategies, and Applications, Crooke, ed., Marcel Dekker Inc., New York (2001). In general, antisense nucleic acid molecules are designed to be complementary to a region of mRNA expressed by a gene, so that the antisense molecule hybridizes to the mRNA, thus blocking translation of the mRNA into protein. Several classes of antisense oligonucleotide are known to those skilled in the art, including cleavers and blockers. The former bind to target RNA sites, activate intracellular nucleases (e.g., RnaseH or Rnase L), that cleave the target RNA. Blockers bind to target RNA, inhibit protein translation by steric hindrance of the ribosomes. Examples of blockers include nucleic acids, morpholino compounds, locked nucleic acids and methylphosphonates (Thompson, Drug Discovery Today, 7:912-917 (2002)). Antisense oligonucleotides are useful directly as therapeutic agents, and are also useful for determining and validating gene function, for example by gene knock-out or gene knock-down experiments. Antisense technology is further described in Layery et al., Curr. Opin. Drug Discov. Devel. 6:561-569 (2003), Stephens et al., Curr. Opin. Mol. Ther. 5:118-122 (2003), Kurreck, Eur. J. Biochem. 270:1628-44 (2003), Dias et al., Mol. Cancer Ther. 1:347-55 (2002), Chen, Methods Mol. Med. 75:621-636 (2003), Wang et al., Curr. Cancer Drug Targets 1:177-96 (2001), and Bennett, Antisense Nucleic Acid Drug. Dev. 12:215-24 (2002)

[0197] The variants described herein can be used for the selection and design of antisense reagents that are specific for particular variants. Using information about the variants described herein, antisense oligonucleotides or other antisense molecules that specifically target mRNA molecules that contain one or more variants of the invention can be designed. In this manner, expression of mRNA molecules that contain one or more variant of the present invention (markers and/or haplotypes) can be inhibited or blocked. In one embodiment, the antisense molecules are designed to specifically bind a particular allelic form (i.e., one or several variants (alleles and/or haplotypes)) of the target nucleic acid, thereby inhibiting translation of a product originating from this specific allele or haplotype, but which do not bind other or alternate variants at the specific polymorphic sites of the target nucleic acid molecule.

[0198] As antisense molecules can be used to inactivate mRNA so as to inhibit gene expression, and thus protein expression, the molecules can be used to treat a disease or disorder, such as Type 2 diabetes. The methodology can involve cleavage by means of ribozymes containing nucleotide sequences complementary to one or more regions in the mRNA that attenuate the ability of the mRNA to be translated. Such mRNA regions include, for example, protein-coding regions, in particular protein-coding regions corresponding to catalytic activity, substrate and/or ligand binding sites, or other functional domains of a protein.

[0199] The phenomenon of RNA interference (RNAi) has been actively studied for the last decade, since its original discovery in C. elegans (Fire et al., Nature 391:806-11 (1998)), and in recent years its potential use in treatment of human disease has been actively pursued (reviewed in Kim & Rossi, Nature Rev. Genet. 8:173-204 (2007)). RNA interference (RNAi), also called gene silencing, is based on using double-stranded RNA molecules (dsRNA) to turn off specific genes. In the cell, cytoplasmic double-stranded RNA molecules (dsRNA) are processed by cellular complexes into small interfering RNA (siRNA). The siRNA guide the targeting of a protein-RNA complex to specific sites on a target mRNA, leading to cleavage of the mRNA (Thompson, Drug Discovery Today, 7:912-917 (2002)). The siRNA molecules are typically about 20, 21, 22 or 23 nucleotides in length. Thus, one aspect of the invention relates to isolated nucleic acid molecules, and the use of those molecules for RNA interference, i.e. as small interfering RNA molecules (siRNA). In one embodiment, the isolated nucleic acid molecules are 18-26 nucleotides in length, preferably 19-25 nucleotides in, length, more preferably 20-24 nucleotides in length, and more preferably 21, 22 or 23 nucleotides in length.

[0200] Another pathway for RNAi-mediated gene silencing originates in endogenously encoded primary microRNA (pri-miRNA) transcripts, which are processed in the cell to generate precursor miRNA (pre-miRNA). These miRNA molecules are exported from the nucleus to the cytoplasm, where they undergo processing to generate mature miRNA molecules (miRNA), which direct translational inhibition by recognizing target sites in the 3′ untranslated regions of mRNAs, and subsequent mRNA degradation by processing P-bodies (reviewed in Kim & Rossi, Nature Rev. Genet. 8:173-204 (2007)).

[0201] Clinical applications of RNAi include the incorporation of synthetic siRNA duplexes, which preferably are approximately 20-23 nucleotides in size, and preferably have 3′ overlaps of 2 nucleotides. Knockdown of gene expression is established by sequence-specific design for the target mRNA. Several commercial sites for optimal design and synthesis of such molecules are known to those skilled in the art.

[0202] Other applications provide longer siRNA molecules (typically 25-30 nucleotides in length, preferably about 27 nucleotides), as well as small hairpin RNAs (shRNAs; typically about 29 nucleotides in length). The latter are naturally expressed, as described in Amarzguioui et al. (FEBS Lett. 579:5974-81 (2005)). Chemically synthetic siRNAs and shRNAs are substrates for in vivo processing, and in some cases provide more potent gene-silencing than shorter designs (Kim et al., Nature Biotechnol. 23:222-226 (2005); Siolas et al., Nature Biotechnol. 23:227-231 (2005)). In general siRNAs provide for transient silencing of gene expression, because their intracellular concentration is diluted by subsequent cell divisions. By contrast, expressed shRNAs mediate long-term, stable knockdown of target transcripts, for as long as transcription of the shRNA takes place (Marques et al., Nature Biotechnol. 23:559-565 (2006); Brummelkamp et al., Science 296: 550-553 (2002)).

[0203] Since RNAi molecules, including siRNA, miRNA and shRNA, act in a sequence-dependent manner, the variants of the present invention (e.g., the markers and haplotypes as described herein) can be used to design RNAi reagents that recognize specific nucleic acid molecules comprising specific alleles and/or haplotypes (e.g., the alleles and/or haplotypes of the present invention), while not recognizing nucleic acid molecules comprising other alleles or haplotypes. These RNAi reagents can thus recognize and destroy the target nucleic acid molecules. As with antisense reagents, RNAi reagents can be useful as therapeutic agents (i.e., for turning off disease-associated genes or disease-associated gene variants), but may also be useful for characterizing and validating gene function (e.g., by gene knock-out or gene knock-down experiments).

[0204] Delivery of RNAi may be performed by a range of methodologies known to those skilled in the art. Methods utilizing non-viral delivery include cholesterol, stable nucleic acid-lipid particle (SNALP), heavy-chain antibody fragment (Fab), aptamers and nanoparticles. Viral delivery methods include use of lentivirus, adenovirus and adeno-associated virus. The siRNA molecules are in some embodiments chemically modified to increase their stability. This can include modifications at the 2′ position of the ribose, including 2′-O-methylpurines and 2′-fluoropyrimidines, which provide resistance to Rnase activity. Other chemical modifications are possible and known to those skilled in the art.

[0205] The following references provide a further summary of RNAi, and possibilities for targeting specific genes using RNAi: Kim & Rossi, Nat. Rev. Genet. 8:173-184 (2007), Chen & Rajewsky, Nat. Rev. Genet. 8: 93-103 (2007), Reynolds, et al., Nat. Biotechnol. 22:326-330 (2004), Chi et al., Proc. Natl. Acad. Sci. USA 100:6343-6346 (2003), Vickers et al., J. Biol. Chem. 278:7108-7118 (2003), Agami, Curr. Opin. Chem. Biol. 6:829-834 (2002), Layery, et al., Curr. Opin. Drug Discov. Devel. 6:561-569 (2003), Shi, Trends Genet. 19:9-12 (2003), Shuey et al., Drug Discov. Today 7:1040-46 (2002), McManus et al., Nat. Rev. Genet. 3:737-747 (2002), Xia et al., Nat. Biotechnol. 20:1006-10 (2002), Plasterk et al., curr. Opin. Genet. Dev. 10:562-7 (2000), Bosher et al., Nat. Cell Biol. 2:E31-6 (2000), and Hunter, Curr. Biol. 9:R440-442 (1999).

[0206] A genetic defect leading to increased predisposition or risk for development of a disease, including Type 2 diabetes, or a defect causing the disease, may be corrected permanently by administering to a subject carrying the defect a nucleic acid fragment that incorporates a repair sequence that supplies the normal/wild-type nucleotide(s) at the site of the genetic defect. Such site-specific repair sequence may concompass an RNA/DNA oligonucleotide that operates to promote endogenous repair of a subject's genomic DNA. The administration of the repair sequence may be performed by an appropriate vehicle, such as a complex with polyethelenimine, encapsulated in anionic liposomes, a viral vector such as an adenovirus vector, or other pharmaceutical compositions suitable for promoting intracellular uptake of the adminstered nucleic acid. The genetic defect may then be overcome, since the chimeric oligonucleotides induce the incorporation of the normal sequence into the genome of the subject, leading to expression of the normal/wild-type gene product. The replacement is propagated, thus rendering a permanent repair and alleviation of the symptoms associated with the disease or condition.

[0207] The present invention provides methods for identifying compounds or agents that can be used to treat Type 2 diabetes. Thus, the variants of the invention are useful as targets for the identification and/or development of therapeutic agents. Such methods may include assaying the ability of an agent or compound to modulate the activity and/or expression of a nucleic acid that includes at least one of the variants (markers and/or haplotypes) of the present invention, or the encoded product of the nucleic acid. This in turn can be used to identify agents or compounds that inhibit or alter the undesired activity or expression of the encoded nucleic acid product. Assays for performing such experiments can be performed in cell-based systems or in cell-free systems, as known to the skilled person. Cell-based systems include cells naturally expressing the nucleic acid molecules of interest, or recombinant cells that have been genetically modified so as to express a certain desired nucleic acid molecule.

[0208] Variant gene expression in a patient can be assessed by expression of a variant-containing nucleic acid sequence (for example, a gene containing at least one variant of the present invention, which can be transcribed into RNA containing the at least one variant, and in turn translated into protein), or by altered expression of a normal/wild-type nucleic acid sequence due to variants affecting the level or pattern of expression of the normal transcripts, for example variants in the regulatory or control region of the gene. Assays for gene expression include direct nucleic acid assays (mRNA), assays for expressed protein levels, or assays of collateral compounds involved in a pathway, for example a signal pathway. Furthermore, the expression of genes that are up- or down-regulated in response to the signal pathway can also be assayed. One embodiment includes operably linking a reporter gene, such as luciferase, to the regulatory region of the gene(s) of interest.

[0209] Modulators of gene expression can in one embodiment be identified when a cell is contacted with a candidate compound or agent, and the expression of mRNA is determined. The expression level of mRNA in the presence of the candidate compound or agent is compared to the expression level in the absence of the compound or agent. Based on this comparison, candidate compounds or agents for treating Type 2 diabetes can be identified as those modulating the gene expression of the variant gene. When expression of mRNA or the encoded protein is statistically significantly greater in the presence of the candidate compound or agent than in its absence, then the candidate compound or agent is identified as a stimulator or up-regulator of expression of the nucleic acid. When nucleic acid expression or protein level is statistically significantly less in the presence of the candidate compound or agent than in its absence, then the candidate compound is identified as an inhibitor or down-regulator of the nucleic acid expression.

[0210] The invention further provides methods of treatment using a compound identified through drug (compound and/or agent) screening as a gene modulator (i.e. stimulator and/or inhibitor of gene expression).

[0211] In a further aspect of the present invention, a pharmaceutical pack (kit) is provided, the pack comprising a therapeutic agent and a set of instructions for administration of the therapeutic agent to humans diagnostically tested for one or more variants of the present invention, as disclosed herein. The therapeutic agent can be a small molecule drug, an antibody, a peptide, an antisense or RNAi molecule, or other therapeutic molecules. In one embodiment, an individual identified as a carrier of at least one variant of the present invention is instructed to take a prescribed dose of the therapeutic agent. In one such embodiment, an individual identified as a homozygous carrier of at least one variant of the present invention is instructed to take a prescribed dose of the therapeutic agent. In another embodiment, an individual identified as a non-carrier of at least one variant of the present invention is instructed to take a prescribed dose of the therapeutic agent.

### Methods of Assessing Probability of Response to Therapeutic Agents, Methods of Monitoring Progress of Treatment and Methods of Treatment

[0212] As is known in the art, individuals can have differential responses to a particular therapy (e.g., a therapeutic agent or therapeutic method). Pharmacogenomics addresses the issue of how genetic variations (e.g., the variants (markers and/or haplotypes) of the present invention) affect drug response, due to altered drug disposition and/or abnormal or altered action of the drug. Thus, the basis of the differential response may be genetically determined in part. Clinical outcomes due to genetic variations affecting drug response may result in toxicity of the drug in certain individuals (e.g., carriers or non-carriers of the genetic variants of the present invention), or therapeutic failure of the drug. Therefore, the variants of the present invention may determine the manner in which a therapeutic agent and/or method acts on the body, or the way in which the body metabolizes the therapeutic agent.

[0213] Accordingly, in one embodiment, the presence of a particular allele at a polymorphic site or haplotype is indicative of a different, e.g. a different response rate, to a particular treatment modality. This means that a patient diagnosed with Type 2 diabetes, and carrying a certain allele at a polymorphic or haplotype of the present invention (e.g., the at-risk and protective alleles and/or haplotypes of the invention) would respond better to, or worse to, a specific therapeutic, drug and/or other therapy used to treat the disease. Therefore, the presence or absence of the marker allele or haplotype could aid in deciding what treatment should be used for a the patient. For example, for a newly diagnosed patient, the presence of a marker or haplotype of the present invention may be assessed (e.g., through testing DNA derived from a blood sample, as described herein). If the patient is positive for a marker allele or haplotype at (that is, at least one specific allele of the marker, or haplotype, is present), then the physician recommends one particular therapy, while if the patient is negative for the at least one allele of a marker, or a haplotype, then a different course of therapy may be recommended (which may include recommending that no immediate therapy, other than serial monitoring for progression of the disease, be performed). Thus, the patient's carrier status could be used to help determine whether a particular treatment modality should be administered. The value lies within the possibilities of being able to diagnose the disease at an early stage, to select the most appropriate treatment, and provide information to the clinician about prognosis/aggressiveness of the disease in order to be able to apply the most appropriate treatment.

[0214] In some embodiments, the treatment modality comprises administering at least one of the therapeutic agents set forth in Agent Table 1 and Agent Table 2. In one embodiment, the therapeutic agent is selected from Biguanides, Thiazolidinediones, Sulfonylureas, Meglitinides, Alpha-glucosidase inhibitors and DPP-4 inhibitors. In one embodiment, the Biguanide is metformin or metformin plus glyburide. Other combination therapies comprising metformin, including combinations with thiazolidinediones, are also contemplated and within the scope of the invention. In another embodiment, the Sulfunylurea is selected from acetohexamide, chlorpropamide, gliclazide Diamicron, glimepiride, glipizide, glyburide, tolazamide and tolbutamide. In another embodiment, the Thiazolidinedione is selected from pioglitazone, rosiglitazone and mitoglitazone or other thiazolidinedione derivatives. In another embodiment, the therapeutic agent is selected from the agents set forth in Agent Table 2.

[0215] The present invention also relates to methods of monitoring progress or effectiveness of a treatment for Type 2 diabetes. This can be done based on the genotype and/or haplotype status of the markers and haplotypes of the present invention, i.e., by assessing the absence or presence of at least one allele of at least one polymorphic marker as disclosed herein, or by monitoring expression of genes that are associated with the variants (markers and haplotypes) of the present invention. The risk gene mRNA or the encoded polypeptide can be measured in a tissue sample (e.g., a peripheral blood sample, or a biopsy sample). Expression levels and/or mRNA levels can thus be determined before and during treatment to monitor its effectiveness. Alternatively, or concomitantly, the genotype and/or haplotype status of at least one risk variant for Type 2 diabetes presented herein is determined before and during treatment to monitor its effectiveness. Alternatively, biological networks or metabolic pathways related to the markers and haplotypes of the present invention can be monitored by determining mRNA and/or polypeptide levels. This can be done for example, by monitoring expression levels or polypeptides for several genes belonging to the network and/or pathway, in samples taken before and during treatment. Alternatively, metabolites belonging to the biological network or metabolic pathway can be determined before and during treatment. Effectiveness of the treatment is determined by comparing observed changes in expression levels/metabolite levels during treatment to corresponding data from healthy subjects.

[0216] The progress of therapy in individuals carrying at least one at-risk allele of at least one marker found to be associated with increased susceptibility or risk of Type 2 diabetes is thus monitored based on the genotype status of the individual. Individuals carrying at-risk variants as described herein may benefit from closer or more frequent monitoring of progress of therapy than non-carriers, alternatively in combination with a particular treatment modality or therapeutic agent being adminstered, as described in the above.

[0217] In a further aspect, the markers of the present invention can be used to increase power and effectiveness of clinical trials. Thus, individuals who are carriers of at least one at-risk variant of the present invention, i.e. individuals who are carriers of at least one allele of at least one polymorphic marker conferring increased risk of developing Type 2 diabetes may be more likely to respond to a particular treatment modality. In one embodiment, individuals who carry at-risk variants for gene(s) in a pathway and/or metabolic network for which a particular treatment (e.g., small molecule drug) is targeting, are more likely to be responders to the treatment. In another embodiment, individuals who carry at-risk variants for a gene, which expression and/or function is altered by the at-risk variant, are more likely to be responders to a treatment modality targeting that gene, its expression or its gene product. This application can improve the safety of clinical trials, but can also enhance the chance that a clinical trial will demonstrate statistically significant efficacy, which may be limited to a certain sub-group of the population, e.g., individuals that are either carriers or non-carriers of the at-risk variants described herein. Thus, one possible outcome of such a trial is that carriers of certain genetic variants, e.g., the markers and haplotypes of the present invention, are statistically significantly likely to show positive response to the therapeutic agent, i.e. experience alleviation of symptoms associated with Type 2 diabetes when taking the therapeutic agent or drug as prescribed.

[0218] In a further aspect, the markers and haplotypes of the present invention can be used for targeting the selection of pharmaceutical agents for specific individuals. Personalized selection of treatment modalities, lifestyle changes or combination of the two, can be realized by the utilization of the at-risk variants of the present invention. Thus, the knowledge of an individual's status for particular markers of the present invention, can be useful for selection of treatment options that target genes or gene products affected by the at-risk variants of the invention. Certain combinations of variants may be suitable for one selection of treatment options, while other gene variant combinations may target other treatment options. Such combination of variant may include one variant, two variants, three variants, or four or more variants, as needed to determine with clinically reliable accuracy the selection of treatment module.

[0219] In addition to the diagnostic and therapeutic uses of the variants of the present invention, the variants (markers and haplotypes) can also be useful markers for human identification, and as such be useful in forensics, paternity testing and in biometrics. The specific use of SNPs for forensic purposes is reviewed by Gill (Int. J. Legal Med. 114:204-10 (2001)). Genetic variations in genomic DNA between individuals can be used as genetic markers to identify individuals and to associate a biological sample with an individual. Genetic markers, including SNPs and microsatellites, can be useful to distinguish individuals. The more markers that are analyzed, the lower the probability that the allelic combination of the markers in any given individual is the same as in an unrelated individual (assuming that the markers are unrelated, i.e. that the markers are in perfect linkage equilibrium). Thus, the variants used for these purposes are preferably unrelated, i.e. they are inherited independently. Thus, preferred markers can be selected from available markers, such as the markers of the present invention, and the selected markers may comprise markers from different regions in the human genome, including markers on different chromosomes.

[0220] In certain applications, the SNPs useful for forensic testing are from degenerate codon positions (i.e., the third position in certain codons such that the variation of the SNP does not affect the amino acid encoded by the codon). In other applications, such for applications for predicting phenotypic characteristics including race, ancestry or physical characteristics, it may be more useful and desirable to utilize SNPs that affect the amino acid sequence of the encoded protein. In other such embodiments, the variant (SNP or other polymorphic marker) affects the expression level of a nearby gene, thus leading to altered protein expression.

[0221] The present invention also relates to computer-implemented applications of the polymorphic markers and haplotypes described herein to be associated with Type 2 diabetes. Such applications can be useful for storing, manipulating or otherwise analyzing genotype data that is useful in the methods of the invention. One example pertains to storing genotype information derived from an individual on readable media, so as to be able to provide the genotype information to a third party (e.g., the individual), or for deriving information from the genotype data, e.g., by comparing the genotype data to information about genetic risk factors contributing to increased susceptibility to Type 2 diabetes, and reporting results based on such comparison.

[0222] One such aspect relates to computer-readable media. In general terms, such medium has capabilities of storing (i) identifier information for at least one polymorphic marker or a haplotype; (ii) an indicator of the frequency of at least one allele of said at least one marker, or the frequency of a haplotype, in individuals with Type 2 diabetes; and an indicator of the frequency of at least one allele of said at least one marker, or the frequency of a haplotype, in a reference population. The reference population can be a disease-free population of individuals. Alternatively, the reference population is a random sample from the general population, and is thus representative of the population at large. The frequency indicator may be a calculated frequency, a count of alleles and/or haplotype copies, or normalized or otherwise manipulated values of the actual frequencies that are suitable for the particular medium.

[0223] Additional information about the individual can be stored on the medium, such as ancestry information, information about sex, physical attributes or characteristics (including height and weight), biochemical measurements (such as blood pressure, blood lipid levels, fasting glucose levels, insulin response measurements), or other useful information that is desirable to store or manipulate in the context of the genotype status of a particular individual.

[0224] The invention furthermore relates to an apparatus that is suitable for determination or manipulation of genetic data useful for determining a susceptibility to Type 2 diabetes in a human individual. Such an apparatus can include a computer-readable memory, a routine for manipulating data stored on the computer-readable memory, and a routine for generating an output that includes a measure of the genetic data. Such measure can include values such as allelic or haplotype frequencies, genotype counts, sex, age, phenotype information, values for odds ratio (OR) or relative risk (RR), population attributable risk (PAR), or other useful information that is either a direct statistic of the original genotype data or based on calculations based on the genetic data.

[0225] The above-described applications can all be practiced with the markers and haplotypes of the invention that have in more detail been described with respect to methods of assessing susceptibility to Type 2 diabetes. Thus, these applications can in general be reduced to practice using markers listed in Tables 1-6, and markers in linkage disequilibrium therewith, e.g. the markers set forth in Tables 22, 23 and 24. In one embodiment, the markers or haplotypes are present within the genomic segments whose sequences are set forth in SEQ ID NO:1, SEQ ID NO:2 or SEQ ID NO:3. In another embodiment, the markers and haplotypes comprise at least one marker selected from rs2497304 (SEQ ID NO:16), rs947591 (SEQ ID NO:30), rs10882091 (SEQ ID NO:4), rs7914814 (SEQ ID NO:24), rs6583830 (SEQ ID NO:20), rs2421943 (SEQ ID NO:15), rs6583826 (SEQ ID NO:19), rs7752906 (SEQ ID NO:32), rs1569699 (SEQ ID NO:6), rs7756992 (SEQ ID NO:21), rs9350271 (SEQ ID NO:33), rs9356744 (SEQ ID NO:34), rs9368222 (SEQ ID NO:35), rs10440833 (SEQ ID NO:36), rs6931514 (SEQ ID NO:37), rs1860316 (SEQ ID NO:10), rs1981647 (SEQ ID NO:11), rs1843622 (SEQ ID NO:9), rs2191113 (SEQ ID NO:13), and rs9890889 (SEQ ID NO:31), optionally including markers in linkage disequilibrium therewith, wherein linkage disequilibrium is defined by numerical values for r² of greater than 0.2. In another embodiment, the marker or haplotype comprises at least one marker selected from rs2497304 allele A, rs947591 allele A, rs10882091 allele C rs7914814 allele T, rs6583830 allele A, rs2421943 allele G, rs6583826 allele G, rs7752906 allele A, rs1569699 allele C, rs7756992 allele G, rs9350271 allele A, rs9356744 allele C, rs9368222 allele A, rs10440833 allele A, rs6931514 allele G, rs1860316 allele A, rs1981647 allele C, rs1843622 allele T, rs2191113 allele A, and rs9890889 allele A. In yet another embodiment, the at least one marker or haplotype comprises at least one marker selected from the markers set forth in Tables 22, 23 and 24.

### Nucleic Acids and Polypeptides

[0226] The nucleic acids and polypeptides described herein can be used in methods of diagnosis of a susceptibility to Type 2 diabetes, as well as in kits useful for such diagnosis.

[0227] An “isolated” nucleic acid molecule, as used herein, is one that is separated from nucleic acids that normally flank the gene or nucleotide sequence (as in genomic sequences) and/or has been completely or partially purified from other transcribed sequences (e.g., as in an RNA library). For example, an isolated nucleic acid of the invention can be substantially isolated with respect to the complex cellular milieu in which it naturally occurs, or culture medium when produced by recombinant techniques, or chemical precursors or other chemicals when chemically synthesized. In some instances, the isolated material will form part of a composition (for example, a crude extract containing other substances), buffer system or reagent mix. In other circumstances, the material can be purified to essential homogeneity, for example as determined by polyacrylamide gel electrophoresis (PAGE) or column chromatography (e.g., HPLC). An isolated nucleic acid molecule of the invention can comprise at least about 50%, at least about 80% or at least about 90% (on a molar basis) of all macromolecular species present. With regard to genomic DNA, the term “isolated” also can refer to nucleic acid molecules that are separated from the chromosome with which the genomic DNA is naturally associated. For example, the isolated nucleic acid molecule can contain less than about 250 kb, 200 kb, 150 kb, 100 kb, 75 kb, 50 kb, 25 kb, 10 kb, 5 kb, 4 kb, 3 kb, 2 kb, 1 kb, 0.5 kb or 0.1 kb of the nucleotides that flank the nucleic acid molecule in the genomic DNA of the cell from which the nucleic acid molecule is derived.

[0228] The nucleic acid molecule can be fused to other coding or regulatory sequences and still be considered isolated. Thus, recombinant DNA contained in a vector is included in the definition of “isolated” as used herein. Also, isolated nucleic acid molecules include recombinant DNA molecules in heterologous host cells or heterologous organisms, as well as partially or substantially purified DNA molecules in solution. “Isolated” nucleic acid molecules also encompass in vivo and in vitro RNA transcripts of the DNA molecules of the present invention. An isolated nucleic acid molecule or nucleotide sequence can include a nucleic acid molecule or nucleotide sequence that is synthesized chemically or by recombinant means. Such isolated nucleotide sequences are useful, for example, in the manufacture of the encoded polypeptide, as probes for isolating homologous sequences (e.g., from other mammalian species), for gene mapping (e.g., by in situ hybridization with chromosomes), or for detecting expression of the gene in tissue (e.g., human tissue), such as by Northern blot analysis or other hybridization techniques.

[0229] The invention also pertains to nucleic acid molecules that hybridize under high stringency hybridization conditions, such as for selective hybridization, to a nucleotide sequence described herein (e.g., nucleic acid molecules that specifically hybridize to a nucleotide sequence containing a polymorphic site associated with a haplotype described herein). In one embodiment, the invention includes variants that hybridize under high stringency hybridization and wash conditions (e.g., for selective hybridization) to a nucleotide sequence that comprises the nucleotide sequence of LD Block C06 (SEQ ID NO:1), LD Block C10 (SEQ ID NO:2; e.g., the nucleotide sequence encoding the IDE, KIF11 and/or the HHEX genes) and LD Block C17 (SEQ ID NO:3), or the CDKAL1 gene or a fragment thereof (or a nucleotide sequence comprising the complement of the nucleotide sequence of LD Block C06 (SEQ ID NO:1), LD Block C10 (SEQ ID NO:2; e.g., the nucleotide sequence encoding the IDE, KIF11 and/or the HHEX genes) and LD Block C17 (SEQ ID NO:3), or the CDKAL1 gene or a fragment thereof), wherein the nucleotide sequence comprises at least one polymorphic allele contained in the haplotypes (e.g., haplotypes) described herein.

[0230] Such nucleic acid molecules can be detected and/or isolated by allele- or sequence-specific hybridization (e.g., under high stringency conditions). Stringency conditions and methods for nucleic acid hybridizations are explained on pages 2.10.1-2.10.16 and pages 6.3.1-6.3.6 in Current Protocols in Molecular Biology (Ausubel, F. et al., “Current Protocols in Molecular Biology”, John Wiley & Sons, (1998)), and Kraus, M. and Aaronson, S., Methods Enzymol., 200:546-556 (1991), the entire teachings of which are incorporated by reference herein.

[0231] The percent identity of two nucleotide or amino acid sequences can be determined by aligning the sequences for optimal comparison purposes (e.g., gaps can be introduced in the sequence of a first sequence). The nucleotides or amino acids at corresponding positions are then compared, and the percent identity between the two sequences is a function of the number of identical positions shared by the sequences (i.e., % identity=# of identical positions/total # of positions×100). In certain embodiments, the length of a sequence aligned for comparison purposes is at least 30%, at least 40%, at least 50%, at least 60%, at least 70%, at least 80%, at least 90%, or at least 95%, of the length of the reference sequence. The actual comparison of the two sequences can be accomplished by well-known methods, for example, using a mathematical algorithm. A non-limiting example of such a mathematical algorithm is described in Karlin, S. and Altschul, S., Proc. Natl. Acad. Sci. USA, 90:5873-5877 (1993). Such an algorithm is incorporated into the NBLAST and XBLAST programs (version 2.0), as described in Altschul, S. et al., Nucleic Acids Res., 25:3389-3402 (1997). When utilizing BLAST and Gapped BLAST programs, the default parameters of the respective programs (e.g., NBLAST) can be used. See the website on the world wide web at ncbi.nlm.nih.gov. In one embodiment, parameters for sequence comparison can be set at score=100, wordlength=12, or can be varied (e.g., W=5 or W=20).

[0232] Other examples include the algorithm of Myers and Miller, CABIOS (1989), ADVANCE and ADAM as described in Torellis, A. and Robotti, C., Comput. Appl. Biosci. 10:3-5 (1994); and FASTA described in Pearson, W. and Lipman, D., Proc. Natl. Acad. Sci. USA, 85:2444-48 (1988). In another embodiment, the percent identity between two amino acid sequences can be accomplished using the GAP program in the GCG software package (Accelrys, Cambridge, UK).

[0233] The present invention also provides isolated nucleic acid molecules that contain a fragment or portion that hybridizes under highly stringent conditions to a nucleic acid that comprises, or consists of, the nucleotide sequence of LD Block C06 (SEQ ID NO:1), LD Block C10 (SEQ ID NO:2; e.g., the nucleotide sequence encoding the IDE, KIF11 and/or the HHEX genes) and LD Block C17 (SEQ ID NO:3), or the CDKAL1 gene or a fragment thereof (or a nucleotide sequence comprising, or consisting of, the complement of the nucleotide sequence of LD Block C06 (SEQ ID NO:1), LD Block C10 (SEQ ID NO:2; e.g., the nucleotide sequence encoding the IDE, KIF11 and/or the HHEX genes) and LD Block C17 (SEQ ID NO:3), or the CDKAL1 gene or a fragment thereof), wherein the nucleotide sequence comprises at least one polymorphic allele contained in the haplotypes (e.g., haplotypes) described herein. The nucleic acid fragments of the invention are at least about 15, at least about 18, 20, 23 or 25 nucleotides, and can be 30, 40, 50, 100, 200, 500, 1000, 10,000 or more nucleotides in length.

[0234] The nucleic acid fragments of the invention are used as probes or primers in assays such as those described herein. “Probes” or “primers” are oligonucleotides that hybridize in a base-specific manner to a complementary strand of a nucleic acid molecule. In addition to DNA and RNA, such probes and primers include polypeptide nucleic acids (PNA), as described in Nielsen, P. et al., Science 254:1497-1500 (1991). A probe or primer comprises a region of nucleotide sequence that hybridizes to at least about 15, typically about 20-25, and in certain embodiments about 40, 50 or 75, consecutive nucleotides of a nucleic acid molecule. In one embodiment, the probe or primer comprises at least one allele of at least one polymorphic marker or at least one haplotype described herein, or the complement thereof. In particular embodiments, a probe or primer can comprise 100 or fewer nucleotides; for example, in certain embodiments from 6 to 50 nucleotides, or, for example, from 12 to 30 nucleotides. In other embodiments, the probe or primer is at least 70% identical, at least 80% identical, at least 85% identical, at least 90% identical, or at least 95% identical, to the contiguous nucleotide sequence or to the complement of the contiguous nucleotide sequence. In another embodiment, the probe or primer is capable of selectively hybridizing to the contiguous nucleotide sequence or to the complement of the contiguous nucleotide sequence. Often, the probe or primer further comprises a label, e.g., a radioisotope, a fluorescent label, an enzyme label, an enzyme co-factor label, a magnetic label, a spin label, an epitope label.

[0235] The nucleic acid molecules of the invention, such as those described above, can be identified and isolated using standard molecular biology techniques well known to the skilled person. The amplified DNA can be labeled (e.g., radiolabeled) and used as a probe for screening a cDNA library derived from human cells. The cDNA can be derived from mRNA and contained in a suitable vector. Corresponding clones can be isolated, DNA can obtained following in vivo excision, and the cloned insert can be sequenced in either or both orientations by art-recognized methods to identify the correct reading frame encoding a polypeptide of the appropriate molecular weight. Using these or similar methods, the polypeptide and the DNA encoding the polypeptide can be isolated, sequenced and further characterized.

[0236] In general, the isolated nucleic acid sequences of the invention can be used as molecular weight markers on Southern gels, and as chromosome markers that are labeled to map related gene positions. The nucleic acid sequences can also be used to compare with endogenous DNA sequences in patients to identify Type 2 diabetes or a susceptibility to Type 2 diabetes, and as probes, such as to hybridize and discover related DNA sequences or to subtract out known sequences from a sample (e.g., subtractive hybridization). The nucleic acid sequences can further be used to derive primers for genetic fingerprinting, to raise anti-polypeptide antibodies using immunisation techniques, and/or as an antigen to raise anti-DNA antibodies or elicit immune responses.

### Antibodies

[0237] Polyclonal antibodies and/or monoclonal antibodies that specifically bind one form of the gene product but not to the other form of the gene product are also provided. Antibodies are also provided which bind a portion of either the variant or the reference gene product that contains the polymorphic site or sites. The term “antibody” as used herein refers to immunoglobulin molecules and immunologically active portions of immunoglobulin molecules, i.e., molecules that contain antigen-binding sites that specifically bind an antigen. A molecule that specifically binds to a polypeptide of the invention is a molecule that binds to that polypeptide or a fragment thereof, but does not substantially bind other molecules in a sample, e.g., a biological sample, which naturally contains the polypeptide. Examples of immunologically active portions of immunoglobulin molecules include F(ab) and F(ab′)₂ fragments which can be generated by treating the antibody with an enzyme such as pepsin. The invention provides polyclonal and monoclonal antibodies that bind to a polypeptide of the invention. The term “monoclonal antibody” or “monoclonal antibody composition”, as used herein, refers to a population of antibody molecules that contain only one species of an antigen binding site capable of immunoreacting with a particular epitope of a polypeptide of the invention. A monoclonal antibody composition thus typically displays a single binding affinity for a particular polypeptide of the invention with which it immunoreacts.

[0238] Polyclonal antibodies can be prepared as described above by immunizing a suitable subject with a desired immunogen, e.g., polypeptide of the invention or a fragment thereof. The antibody titer in the immunized subject can be monitored over time by standard techniques, such as with an enzyme linked immunosorbent assay (ELISA) using immobilized polypeptide. If desired, the antibody molecules directed against the polypeptide can be isolated from the mammal (e.g., from the blood) and further purified by well-known techniques, such as protein A chromatography to obtain the IgG fraction. At an appropriate time after immunization, e.g., when the antibody titers are highest, antibody-producing cells can be obtained from the subject and used to prepare monoclonal antibodies by standard techniques, such as the hybridoma technique originally described by Kohler and Milstein, Nature 256:495-497 (1975), the human B cell hybridoma technique (Kozbor et al., Immunol. Today 4: 72 (1983)), the EBV-hybridoma technique (Cole et al., Monoclonal Antibodies and Cancer Therapy, Alan R. Liss, 1985, Inc., pp. 77-96) or trioma techniques. The technology for producing hybridomas is well known (see generally Current Protocols in Immunology (1994) Coligan et al., (eds.) John Wiley & Sons, Inc., New York, N.Y.). Briefly, an immortal cell line (typically a myeloma) is fused to lymphocytes (typically splenocytes) from a mammal immunized with an immunogen as described above, and the culture supernatants of the resulting hybridoma cells are screened to identify a hybridoma producing a monoclonal antibody that binds a polypeptide of the invention.

[0239] Any of the many well known protocols used for fusing lymphocytes and immortalized cell lines can be applied for the purpose of generating a monoclonal antibody to a polypeptide of the invention (see, e.g., Current Protocols in Immunology, supra; Galfre et al., Nature 266:55052 (1977); R. N. Kenneth, in Monoclonal Antibodies: A New Dimension In Biological Analyses, Plenum Publishing Corp., New York, N.Y. (1980); and Lerner, Yale J. Biol. Med. 54:387-402 (1981)). Moreover, the ordinarily skilled worker will appreciate that there are many variations of such methods that also would be useful.

[0240] Alternative to preparing monoclonal antibody-secreting hybridomas, a monoclonal antibody to a polypeptide of the invention can be identified and isolated by screening a recombinant combinatorial immunoglobulin library (e.g., an antibody phage display library) with the polypeptide to thereby isolate immunoglobulin library members that bind the polypeptide. Kits for generating and screening phage display libraries are commercially available (e.g., the Pharmacia Recombinant Phage Antibody System, Catalog No. 27-9400-01; and the Stratagene SurfZAP™ Phage Display Kit, Catalog No. 240612). Additionally, examples of methods and reagents particularly amenable for use in generating and screening antibody display library can be found in, for example, U.S. Pat. No. 5,223,409; PCT Publication No. WO 92/18619; PCT Publication No. WO 91/17271; PCT Publication No. WO 92/20791; PCT Publication No. WO 92/15679; PCT Publication No. WO 93/01288; PCT Publication No. WO 92/01047; PCT Publication No. WO 92/09690; PCT Publication No. WO 90/02809; Fuchs et al., Bio/Technology 9: 1370-1372 (1991); Hay et al., Hum. Antibod. Hybridomas 3:81-85 (1992); Huse et al., Science 246: 1275-1281 (1989); and Griffiths et al., EMBO J. 12:725-734 (1993).

[0241] Additionally, recombinant antibodies, such as chimeric and humanized monoclonal antibodies, comprising both human and non-human portions, which can be made using standard recombinant DNA techniques, are within the scope of the invention. Such chimeric and humanized monoclonal antibodies can be produced by recombinant DNA techniques known in the art.

[0242] In general, antibodies (e.g., a monoclonal antibody) can be used to isolate a polypeptide of the invention by standard techniques, such as affinity chromatography or immunoprecipitation. A polypeptide-specific antibody can facilitate the purification of natural polypeptide from cells and of recombinantly produced polypeptide expressed in host cells. Moreover, an antibody specific for a polypeptide of the invention can be used to detect the polypeptide (e.g., in a cellular lysate, cell supernatant, or tissue sample) in order to evaluate the abundance and pattern of expression of the polypeptide. Antibodies can be used diagnostically to monitor protein levels in tissue as part of a clinical testing procedure, e.g., to, for example, determine the efficacy of a given treatment regimen. The antibody can be coupled to a detectable substance to facilitate its detection. Examples of detectable substances include various enzymes, prosthetic groups, fluorescent materials, luminescent materials, bioluminescent materials, and radioactive materials. Examples of suitable enzymes include horseradish peroxidase, alkaline phosphatase, beta-galactosidase, or acetylcholinesterase; examples of suitable prosthetic group complexes include streptavidin/biotin and avidin/biotin; examples of suitable fluorescent materials include umbelliferone, fluorescein, fluorescein isothiocyanate, rhodamine, dichlorotriazinylamine fluorescein, dansyl chloride or phycoerythrin; an example of a luminescent material includes luminol; examples of bioluminescent materials include luciferase, luciferin, and aequorin, and examples of suitable radioactive material include ¹²⁵I, ¹³¹I, ³⁵S or ³H.

[0243] Antibodies may also be useful in pharmacogenomic analysis. In such embodiments, antibodies against variant proteins encoded by nucleic acids as described herein, such as variant proteins that are encoded by nucleic acids that contain at least one polymorphic marker of the invention, can be used to identify individuals that require modified treatment modalities.

[0244] Antibodies can furthermore be useful for assessing expression of variant proteins in disease states, such as in active stages of Type 2 diabetes, or in an individual with a predisposition to Type 2 diabetes that is related to the function of the protein. Antibodies specific for a variant protein of the present invention that is encoded by a nucleic acid that comprises at least one polymorphic marker or haplotype as described herein can be used to screen for the presence of the variant protein, for example to screen for a predisposition to Type 2 diabetes as indicated by the presence of the variant protein.

[0245] Antibodies can be used in other methods. Thus, antibodies are useful as diagnostic tools for evaluating proteins, such as variant proteins of the invention, in conjunction with analysis by electrophoretic mobility, isoelectric point, tryptic or other protease digest, or for use in other physical assays known to those skilled in the art. Antibodies may also be used in tissue typing. In one such embodiment, a specific variant protein has been correlated with expression in a specific tissue type, and antibodies specific for the variant protein can then be used to identify the specific tissue type.

[0246] Subcellular localization of proteins, including variant proteins, can also be determined using antibodies, and can be applied to assess aberrant subcellular localization of the protein in cells in various tissues. Such use can be applied in genetic testing, but also in monitoring a particular treatment modality. In the case where treatment is aimed at correcting the expression level or presence of the variant protein or aberrant tissue distribution or developmental expression of the variant protein, antibodies specific for the variant protein or fragments thereof can be used to monitor therapeutic efficacy.

[0247] Antibodies are further useful for inhibiting variant protein function, for example by blocking the binding of a variant protein to a binding molecule or partner. Such uses can also be applied in a therapeutic context in which treatment involves inhibiting a variant protein's function. An antibody can be for example be used to block or competitively inhibit binding, thereby modulating (i.e., agonizing or antagonizing) the activity of the protein. Antibodies can be prepared against specific protein fragments containing sites required for specific function or against an intact protein that is associated with a cell or cell membrane. For administration in vivo, an antibody may be linked with an additional therapeutic payload, such as radionuclide, an enzyme, an immunogenic epitope, or a cytotoxic agent, including bacterial toxins (diphtheria or plant toxins, such as ricin). The in vivo half-life of an antibody or a fragment thereof may be increased by pegylation through conjugation to polyethylene glycol.

[0248] The present invention will now be exemplified by the following non-limiting examples.

### EXEMPLIFICATION

### Example 1

[0249] The following contains description of the identification of susceptibility factors found to be associated with Type 2 diabetes through single-point and haplotype analysis of SNP markers.

### Methods

### Icelandic Cohort

[0250] The Data Protection Authority of Iceland and the National Bioethics Committee of Iceland approved the study. All participants in the study gave informed consent. All personal identifiers associated with blood samples, medical information and genealogy were first encrypted by the Data Protection Authority, using a third-party encryption system.

[0251] For this study, 2400 Type 2 diabetes patients were identified who were diagnosed either through a long-term epidemiologic study done at the Icelandic Heart Association over the past 30 years or at one of two major hospitals in Reykjavik over the past 12 years. Two-thirds of these patients were alive, representing about half of the population of known Type 2 diabetes patients in Iceland today. The majority of these patients were contacted for this study, and the cooperation rate exceeded 80%. All participants in the study visited the Icelandic Heart Association where they answered a questionnaire, had blood drawn and a fasting plasma glucose measurements taken. Questions about medication and age at diagnosis were included. The Type 2 diabetes patients in this study were diagnosed as described in our previously published linkage study (Reynisdottir et al., Am J Hum Genet 73, 323 (2003). In brief, the diagnosis of Type 2 diabetes was confirmed by study physicians through previous medical records, medication history, and/or new laboratory measurements. For previously diagnosed Type 2 diabetes patients, reporting of the use of oral glucose-lowering agent confirmed Type 2 diabetes. Individuals who were currently treated with insulin were classified as having Type 2 diabetes if they were also using or had previously used oral glucose-lowering agents. In this cohort the majority of patients on medication take oral glucose-lowering agents and only a small portion (9%) require insulin. For hitherto undiagnosed individuals, the diagnosis of Type 2 diabetes and impaired fasting glucose (IFG) was based on the criteria set by the American Diabetes Association (Expert Committee on the Diagnosis and Classification of Diabetes Mellitus 1997). The average age of the Type 2 diabetes patients in this study was 69.7 years.

### Replication Cohorts

[0252] The Danish study group was a set of Type 2 diabetes patients from the Steno Diabetes Center in Copenhagen (N=1,018) and from the Inter99 population-based sample of 30-60 year old individuals living in the greater Copenhagen area and sampled at Research Centre for Prevention and Health28 (N=359). Diabetes and pre-diabetes categories were diagnosed according to the 1999 World Health Organization (WHO) criteria. An effectively random subset (N=2,400) of Danish controls with BMI measurements were obtained from the Inter99 collection. Informed written consent was obtained from all subjects before participation. The study was approved by the Ethical Committee of Copenhagen County and was in accordance with the principles of the Helsinki Declaration.

[0253] The PENN CATH study in the US is a cross sectional study of the association of biochemical and genetic factors with coronary atherosclerosis in a consecutive cohort of patients undergoing cardiac catheterization at the University of Pennsylvania Medical Center between July 1998 and March 2003. Type 2 diabetes was defined as history of fasting blood glucose≧26 mg/dl, 2-hour post-prandial glucose≧200 mg/dl, use of oral hypoglycemic agents, or insulin and oral hypoglycemic in a subject greater than age 40. The University of Pennsylvania Institutional Review Board approved the study protocol and all subjects gave written informed consent. Ethnicity was determined through self-report. A total of 468 Caucasian Type 2 diabetes cases were derived from this cohort. Additionally, 1024 unaffected (with respect to Type 2 diabetes) Caucasian controls were randomly drawn from the same study.

[0254] The DNA used for genotyping was the product of whole-genome amplification, by use of the GenomiPhi Amplification kit (Amersham), of DNA isolated from the peripheral blood of the Danish and US Type 2 diabetes patients and controls.

### Genotyping

[0255] A genome-wide scan of 1399 Icelandic diabetes patients was performed using Infinium HumanHap300 SNP chips from Illumina for assaying approximately 317,000 single nucleotide polymorphisms (SNPs) on a single chip (Illumina, San Diego, Calif., USA). SNP genotyping for replication in other case-control cohorts was carried using the Centaurus platform (Nanogen).

### Statistical Methods for Association Analysis

[0256] For single marker association to Type 2 diabetes, we used a likelihood ratio test to calculate a two-sided p-value for each allele. We calculated relative risk (RR) and population attributable risk (PAR) assuming a multiplicative model (C. T. Falk, P. Rubinstein, Ann Hum Genet 51 (Pt 3), 227 (1987); J. D. Terwilliger, J. Ott, Hum Hered 42, 337 (1992)). For the CEPH Caucasian HapMap data, we calculated LD between pairs of SNPs using the standard definition of D' (R. C. Lewontin, Genetics 50, 757 (1964)) and R² W. G. Hill, A. Robertson, Genetics 60, 615 (November, 1968). When plotting all SNP combinations to elucidate the LD structure in a particular region, we plotted D′ in the upper left corner and p-values in the lower right corner. In the LD plots we present, the markers are plotted equidistantly rather than according to their physical positions.

### Results

### Genome-Wide Association Study

[0257] We successfully genotyped 1399 Icelandic Type 2 diabetes patients and 5275 population control individuals using the Illumina 330K chip. Association analysis was performed using single SNPs, two marker haplotypes and extended haplotypes within LD blocks. After correcting the p-value for relatedness we identified 49 single markers and two marker haplotypes at 21 loci (i.e. genetic susceptibility locations in the genome) that had a p-value less than 5×10⁻⁵ (Table 1). In addition, 10 extended haplotypes at 8 additional loci were selected by the same criteria (Table 2). Within the patient group, 700 individuals were non-obese (BMI<30) and those were tested separately for association. After correcting the p-value for relatedness, 36 single markers and two marker haplotypes at 20 loci had a p-value less than 5×10⁻⁵ (Table 3). Three of those loci were also identified when the total group was analysed. In addition 6 extended haplotypes at 4 additional loci were selected by the same criteria (Table 4). The obese group of 531 patients (BMI>30) was also analysed separately for association. After correcting the p-value for relatedness 38 single markers and two marker haplotypes at 16 loci had a p-value less than 5×10⁻⁵ (Table 5). One of those loci was also identified when the total group was analysed but no overlap was found between the non-obese and obese groups using this criteria. In addition 10 extended haplotypes at 7 additional loci had a p-value less than 5×10⁻⁵ in association analysis of obese diabetics (Table 6).

[0258] The single-marker association and two-marker and extended haplotype association analysis presented in Tables 1-6 thus represents evidence for multiple susceptibility variants for Type 2 diabetes. It should be noted that for single-marker SNP analysis as presented herein, susceptibility variants can either be represented by increased risk, wherein one allele is overrepresented in the patient group compared with controls. Alternatively, the susceptibility variants can be represented by the other allele of the SNP in question for that allele, under-representation in patients compared with controls is expected. This is a natural consequence of association analysis to genetic elements comprising two alleles. For multi-marker haplotypes or for polymorphic markers comprising more than one marker, at-risk association may be observed to one (or more) at-risk allele or haplotype. Protective variants in form of association (with RR-values less than unity) to one (or more) protective variants or haplotypes may also be observed, depending on the genetic composition and haplotype structure in the genetic region in question.

TABLE 1
Single markers and two marker haplotypes associated with Type 2
Diabetes.

| Chr | Pos | Punadj | Padj | Rrisk | Aff. frq | Ctrl. frq | Haplotype |
|---|---|---|---|---|---|---|---|
| chr1 | 151511890 | 4.01E−06 | 4.49E−05 | 1.223 | 0.407 | 0.360 | 3 rs3738028 |
| chr2 | 40560735 | 2.41E−06 | 3.06E−05 | 1.225 | 0.593 | 0.543 | 1 rs13414307 |
| chr2 | 40560735 | 4.59E−07 | 8.27E−06 | 1.243 | 0.571 | 0.517 | 1 rs13414307 3 rs1990609 |
| chr2 | 54969849 | 5.53E−08 | 1.56E−06 | 1.287 | 0.335 | 0.281 | 3 rs930493 4 rs10173697 |
| chr2 | 54977961 | 3.12E−06 | 3.75E−05 | 1.224 | 0.553 | 0.503 | 4 rs10173697 |
| chr3 | 89323970 | 2.60E−06 | 3.25E−05 | 1.380 | 0.904 | 0.872 | 4 rs12486049 |
| chr6 | 6965113 | 1.00E−06 | 1.53E−05 | 1.705 | 0.072 | 0.044 | 1 rs490213 3 rs814174 |
| chr6 | 31556294 | 3.22E−06 | 3.78E−05 | 1.232 | 0.372 | 0.325 | 2 rs2516424 |
| chr6 | 31556294 | 1.93E−06 | 2.57E−05 | 1.240 | 0.368 | 0.320 | 2 rs2516424 2 rs4947324 |
| chr6 | 132422361 | 3.10E−06 | 3.74E−05 | 1.262 | 0.278 | 0.234 | 3 rs9483377 2 rs997607 |
| chr6 | 132422361 | 3.97E−06 | 4.54E−05 | 1.252 | 0.276 | 0.233 | 3 rs9483377 3 rs7745875 |
| chr6 | 132422361 | 7.98E−07 | 1.25E−05 | 1.249 | 0.356 | 0.307 | 3 rs9483377 |
| chr6 | 150460378 | 5.01E−07 | 8.86E−06 | 1.293 | 0.794 | 0.749 | 1 rs11155700 |
| chr6 | 150461077 | 5.15E−07 | 9.05E−06 | 1.292 | 0.794 | 0.749 | 2 rs12213837 |
| chr6 | 164474219 | 3.07E−06 | 3.63E−05 | 0.813 | 0.479 | 0.531 | 4 rs206732 2 rs933251 |
| chr7 | 87951463 | 4.36E−06 | 4.89E−05 | 1.273 | 0.753 | 0.705 | 1 rs2192319 |
| chr8 | 124196776 | 1.21E−06 | 1.78E−05 | 1.253 | 0.721 | 0.673 | 3 rs952656 |
| chr8 | 124202699 | 5.97E−07 | 9.96E−06 | 0.722 | 0.108 | 0.143 | 4 rs13252935 3 rs7824293 |
| chr9 | 90164936 | 2.03E−06 | 2.62E−05 | 1.304 | 0.192 | 0.154 | 1 rs10993008 |
| chr9 | 95493692 | 2.38E−06 | 3.03E−05 | 1.253 | 0.309 | 0.263 | 3 rs10990568 3 rs4743148 |
| chr9 | 95510129 | 5.85E−07 | 9.80E−06 | 1.252 | 0.365 | 0.315 | 3 rs4743148 |
| chr10 | 53058229 | 1.39E−06 | 1.98E−05 | 1.240 | 0.377 | 0.328 | 4 rs7915186 4 rs3829170 |
| chr10 | 53063104 | 1.37E−06 | 1.96E−05 | 1.239 | 0.386 | 0.336 | 4 rs3829170 3 rs7922112 |
| chr10 | 94301795 | 2.54E−08 | 8.44E−07 | 1.276 | 0.614 | 0.555 | 3 rs2421943 |
| chr10 | 94301795 | 2.11E−09 | 1.19E−07 | 1.297 | 0.585 | 0.521 | 3 rs2421943 2 rs7917359 |
| chr10 | 94304784 | 1.49E−07 | 3.32E−06 | 0.797 | 0.443 | 0.499 | 3 rs7908111 3 rs2497304 |
| chr10 | 94309972 | 6.60E−09 | 2.85E−07 | 0.779 | 0.455 | 0.517 | 3 rs1999763 4 rs10882091 |
| chr10 | 94309972 | 6.60E−09 | 2.85E−07 | 0.779 | 0.455 | 0.517 | 3 rs1999763 3 rs6583830 |
| chr10 | 94337810 | 1.36E−06 | 1.91E−05 | 1.228 | 0.518 | 0.467 | 3 rs6583826 |
| chr10 | 94337810 | 7.18E−08 | 1.91E−06 | 1.262 | 0.449 | 0.393 | 3 rs6583826 2 rs10882091 |
| chr10 | 94364357 | 7.76E−08 | 2.04E−06 | 1.259 | 0.466 | 0.410 | 2 rs10882091 3 rs7923837 |
| chr10 | 94364357 | 9.33E−08 | 2.30E−06 | 1.256 | 0.472 | 0.415 | 2 rs10882091 |
| chr10 | 94372930 | 9.81E−08 | 2.40E−06 | 1.256 | 0.472 | 0.415 | 4 rs7914814 |
| chr10 | 94388098 | 9.33E−08 | 2.30E−06 | 1.256 | 0.472 | 0.415 | 1 rs6583830 |
| chr10 | 94442410 | 8.41E−08 | 2.17E−06 | 1.256 | 0.527 | 0.470 | 1 rs2275729 3 rs1111875 |
| chr10 | 94482696 | 7.56E−08 | 1.95E−06 | 1.258 | 0.542 | 0.485 | 1 rs2497304 |
| chr10 | 94485733 | 1.64E−06 | 2.21E−05 | 1.225 | 0.526 | 0.475 | 1 rs947591 |
| chr12 | 33373479 | 3.87E−06 | 4.37E−05 | 1.391 | 0.110 | 0.082 | 4 rs1905421 |
| chr15 | 98156854 | 3.80E−06 | 4.30E−05 | 0.815 | 0.469 | 0.521 | 1 rs9920347 3 rs11635811 |
| chr16 | 22705353 | 2.93E−06 | 3.57E−05 | 1.264 | 0.781 | 0.738 | 4 rs724466 |
| chr16 | 72066252 | 4.23E−06 | 4.68E−05 | 0.625 | 0.038 | 0.059 | 2 rs1862773 4 rs825842 |
| chr16 | 72086481 | 5.86E−07 | 9.82E−06 | 0.612 | 0.043 | 0.069 | 4 rs2432543 3 rs4887826 |
| chr17 | 66072384 | 7.34E−07 | 1.20E−05 | 1.236 | 0.564 | 0.511 | 3 rs17763769 1 rs1860316 |
| chr17 | 66117911 | 1.18E−07 | 2.77E−06 | 0.781 | 0.282 | 0.335 | 3 rs1860316 2 rs17763811 |
| chr17 | 66117911 | 6.79E−08 | 1.83E−06 | 1.281 | 0.707 | 0.653 | 1 rs1860316 |
| chr17 | 66132788 | 1.80E−06 | 2.43E−05 | 1.226 | 0.563 | 0.513 | 2 rs1981647 |
| chr17 | 66149102 | 1.39E−06 | 1.99E−05 | 1.239 | 0.665 | 0.615 | 4 rs1843622 |
| chr17 | 66159416 | 7.32E−07 | 1.19E−05 | 1.266 | 0.744 | 0.696 | 1 rs2191113 |
| chr20 | 36391335 | 2.09E−07 | 4.45E−06 | 1.250 | 0.550 | 0.495 | 3 rs4592915 2 rs2232580 |

Associating alleles are indicated in front of each marker (Allelic code: A = 1, C = 2, G = 3, T = 4)

TABLE 2
Multi-marker haplotypes associated with Type 2 Diabetes.

| Chr | Pos | Punadj | Padj | Rrisk | Aff. frq | Ctrl. frq | Haplotype* |
|---|---|---|---|---|---|---|---|
| chr2 | 19652497 | 2.00E−08 | 6.98E−07 | 2.492 | 0.027 | 0.011 | 3 rs1593746 3 rs4666491 3 rs12710718 4 rs1579204 |
| | | | | | | | 1 rs824506 2 rs1344652 1 rs4109456 3 rs1427547 |
| | | | | | | | 2 rs1522490 1 rs6757410 4 rs1863776 |
| chr2 | 74747736 | 1.95E−06 | 2.59E−05 | 1.903 | 0.036 | 0.019 | 2 rs363674 2 rs759075 1 rs4853033 1 rs205651 |
| | | | | | | | 4 rs363608 1 rs1063588 2 rs363612 1 rs150139 |
| | | | | | | | 2 rs363617 4 rs1137 4 rs828902 1 rs205627 |
| chr9 | 29300367 | 5.32E−07 | 9.29E−06 | 1.813 | 0.042 | 0.024 | 1 rs4879332 2 rs1928663 4 rs2183357 2 rs10813050 |
| | | | | | | | 2 rs1928661 4 rs10491662 2 rs1169758 2 rs1169757 |
| | | | | | | | 3 rs12378755 |
| chr9 | 32290296 | 4.13E−06 | 4.68E−05 | 1.489 | 0.075 | 0.052 | 3 rs1537156 2 rs7024902 4 rs7037573 4 rs3928808 |
| | | | | | | | 4 rs10970902 3 rs1331226 3 rs10758127 1 rs1331231 |
| | | | | | | | 1 rs992710 2 rs1411866 3 rs10511901 3 rs2094703 |
| | | | | | | | 1 rs7854942 4 rs2150637 |
| chr11 | 22912998 | 7.25E−07 | 1.19E−05 | 1.687 | 0.059 | 0.036 | 3 rs11026796 1 rs1019216 2 rs2302423 4 rs4923035 |
| | | | | | | | 1 rs2429777 4 rs12575930 3 rs887567 2 rs733295 |
| | | | | | | | 3 rs7113718 1 rs7934814 4 rs3909703 4 rs3862134 |
| | | | | | | | 3 rs10833917 1 rs6483890 2 rs2433454 |
| chr13 | 60726830 | 1.52E−06 | 2.12E−05 | 1.481 | 0.108 | 0.075 | 4 rs1411145 4 rs9539100 3 rs991666 3 rs1026924 |
| | | | | | | | 3 rs4886330 3 rs1411568 3 rs1028965 1 rs9670441 |
| chr16 | 72082296 | 1.71E−06 | 2.29E−05 | 0.595 | 0.033 | 0.054 | 4 rs1424011 2 rs1862778 1 rs4888373 4 rs8053178 |
| | | | | | | | 4 rs825842 4 rs2432543 2 rs6564272 3 rs4887826 |
| | | | | | | | 3 rs825851 |
| chr17 | 66118095 | 3.46E−08 | 1.05E−06 | 0.762 | 0.229 | 0.281 | 2 rs16913 2 rs10512540 3 rs17763769 1 rs2109051 |
| | | | | | | | 3 rs1860316 3 rs9904090 4 rs1981647 2 rs1843622 |
| | | | | | | | 2 rs4584866 3 rs17791650 3 rs9891997 3 rs2191113 |
| chr18 | 67477090 | 1.12E−06 | 1.64E−05 | 0.547 | 0.033 | 0.059 | 2 rs9956771 4 rs8088887 2 rs10514019 4 rs719328 |
| | | | | | | | 4 rs1942399 2 rs1942396 4 rs948665 3 rs11151691 |
| chrX | 56884473 | 4.32E−06 | 4.85E−05 | 1.184 | 0.709 | 0.673 | 1 rs12858633 1 rs5960235 3 rs5914036 3 rs6612746 |

*Associating alleles are indicated in front of each marker (Allelic code: A = 1, C = 2, G = 3, T = 4)

TABLE 3
Single markers and two marker haplotypes associated with Type 2
Diabetes in non-obese patients

| Chr | Pos | Punadj | Padj | Rrisk | Aff. frq | Ctrl. frq | Haplotype* |
|---|---|---|---|---|---|---|---|
| chr1 | 29759353 | 5.23E−06 | 3.18E−05 | 0.661 | 0.104 | 0.149 | 4 rs4949283 2 rs502545 |
| chr2 | 53360168 | 8.51E−06 | 4.70E−05 | 1.411 | 0.855 | 0.807 | 1 rs1424963 |
| chr5 | 87772535 | 1.95E−06 | 1.36E−05 | 1.394 | 0.244 | 0.188 | 3 rs10505855 2 rs12514611 |
| chr6 | 6965113 | 5.76E−06 | 3.39E−05 | 1.891 | 0.080 | 0.044 | 1 rs490213 3 rs814174 |
| chr6 | 20650200 | 8.46E−06 | 4.68E−05 | 1.327 | 0.307 | 0.250 | 3 rs7758851 2 rs1569699 |
| chr6 | 20771314 | 1.06E−06 | 8.14E−06 | 1.369 | 0.292 | 0.232 | 1 rs4712527 3 rs7756992 |
| chr6 | 20787289 | 4.47E−06 | 2.79E−05 | 1.333 | 0.315 | 0.256 | 2 rs1569699 |
| chr6 | 20787688 | 1.78E−06 | 1.28E−05 | 0.741 | 0.682 | 0.743 | 1 rs7756992 3 rs9295478 |
| chr6 | 20787688 | 1.11E−06 | 8.61E−06 | 1.368 | 0.292 | 0.232 | 3 rs7756992 |
| chr9 | 95447272 | 6.08E−06 | 3.61E−05 | 0.764 | 0.469 | 0.536 | 2 rs10818991 2 rs10990303 |
| chr11 | 23939149 | 3.05E−06 | 2.02E−05 | 1.525 | 0.128 | 0.088 | 4 rs1879230 |
| chr11 | 130184827 | 9.00E−06 | 4.93E−05 | 1.303 | 0.416 | 0.353 | 4 rs11222327 1 rs1939905 |
| chr13 | 26578564 | 2.15E−06 | 1.51E−05 | 0.723 | 0.220 | 0.281 | 1 rs565707 1 rs6491198 |
| chr13 | 26578564 | 8.29E−07 | 6.63E−06 | 1.381 | 0.763 | 0.700 | 2 rs565707 |
| chr13 | 26635031 | 3.14E−06 | 2.03E−05 | 1.309 | 0.606 | 0.540 | 2 rs7984685 |
| chr13 | 26637643 | 3.37E−06 | 2.15E−05 | 1.308 | 0.606 | 0.540 | 2 rs7998347 |
| chr13 | 26801814 | 9.09E−06 | 4.97E−05 | 1.340 | 0.771 | 0.716 | 1 rs1333350 |
| chr13 | 26801814 | 1.29E−06 | 9.76E−06 | 0.709 | 0.195 | 0.254 | 3 rs1333350 4 rs7987436 |
| chr13 | 108034018 | 9.08E−06 | 4.97E−05 | 1.322 | 0.732 | 0.674 | 2 rs4771591 |
| chr16 | 12697094 | 8.10E−06 | 4.59E−05 | 0.616 | 0.068 | 0.105 | 2 rs6498353 3 rs9941146 |
| chr17 | 66072384 | 2.10E−07 | 2.09E−06 | 1.347 | 0.585 | 0.511 | 3 rs17763769 1 rs1860316 |
| chr17 | 66117911 | 1.01E−09 | 2.42E−08 | 0.677 | 0.254 | 0.335 | 3 rs1860316 2 rs17763811 |
| chr17 | 66117911 | 1.20E−09 | 2.73E−08 | 1.462 | 0.734 | 0.653 | 1 rs1860316 |
| chr17 | 66132788 | 7.18E−07 | 5.88E−06 | 1.329 | 0.583 | 0.513 | 2 rs1981647 |
| chr17 | 66149102 | 4.33E−07 | 3.84E−06 | 1.355 | 0.684 | 0.615 | 4 rs1843622 |
| chr17 | 66159416 | 4.49E−09 | 8.28E−08 | 1.467 | 0.771 | 0.696 | 1 rs2191113 |
| chr17 | 66173475 | 4.75E−06 | 2.88E−05 | 1.472 | 0.885 | 0.839 | 1 rs9890889 |
| chr18 | 41053807 | 4.27E−06 | 2.68E−05 | 1.389 | 0.218 | 0.167 | 3 rs10502860 |
| chr18 | 63441694 | 8.25E−06 | 4.66E−05 | 0.687 | 0.121 | 0.167 | 4 rs764133 4 rs7237209 |
| chr18 | 63465082 | 4.35E−06 | 2.67E−05 | 1.443 | 0.867 | 0.819 | 2 rs7237209 |
| chr19 | 3316583 | 7.55E−06 | 4.33E−05 | 1.370 | 0.227 | 0.176 | 1 rs3810420 |
| chr20 | 36391335 | 8.38E−06 | 4.65E−05 | 1.292 | 0.558 | 0.495 | 3 rs4592915 2 rs2232580 |
| chr21 | 13769165 | 3.83E−06 | 2.40E−05 | 1.599 | 0.927 | 0.888 | 1 rs468601 |
| chr21 | 33298252 | 1.17E−06 | 9.03E−06 | 1.358 | 0.311 | 0.249 | 3 rs2834061 |
| chr21 | 39374906 | 4.04E−06 | 2.51E−05 | 1.308 | 0.631 | 0.566 | 4 rs369906 |
| chr22 | 29580921 | 8.60E−06 | 4.75E−05 | 1.347 | 0.265 | 0.212 | 3 rs8142410 3 rs5994353 |

*Associating alleles are indicated in front of each marker (Allelic code: A = 1, C = 2, G = 3, T = 4)

TABLE 4
Multi-marker haplotypes associated with Type 2 Diabetes in non-obese patients

| Chr | Pos | Punadj | Padj | Rrisk | Aff. frq | Ctrl. frq | Haplotype* |
|---|---|---|---|---|---|---|---|
| chr2 | 19652497 | 3.14E−07 | 2.93E−06 | 2.859 | 0.031 | 0.011 | 3 rs1593746 3 rs4666491 3 rs12710718 4 rs1579204 |
| | | | | | | | 1 rs824506 2 rs1344652 1 rs4109456 3 rs1427547 |
| | | | | | | | 2 rs1522490 1 rs6757410 4 rs1863776 |
| chr5 | 2458281 | 6.12E−06 | 3.62E−05 | 0.077 | 0.001 | 0.017 | 3 rs931283 1 rs160730 3 rs468085 4 rs464716 |
| | | | | | | | 3 rs10052956 2 rs160729 3 rs315914 1 rs1039096 |
| chr6 | 137323498 | 6.46E−06 | 3.73E−05 | 2.566 | 0.040 | 0.016 | 2 rs6570118 4 rs7743308 3 rs6928748 2 rs12214917 |
| | | | | | | | 2 rs6936698 2 rs4896224 2 rs10872468 |
| chr11 | 32116221 | 4.15E−06 | 2.57E−05 | 1.362 | 0.266 | 0.211 | 1 rs224633 3 rs581573 4 rs223070 4 rs10488686 |
| | | | | | | | 4 rs4922579 2 rs110688 4 rs1605271 3 rs4922901 |
| | | | | | | | 3 rs7950374 1 rs1033584 1 rs12788147 3 rs11031625 |
| | | | | | | | 2 rs880587 4 rs989570 2 rs10835861 |
| chr17 | 66118095 | 7.82E−10 | 1.95E−08 | 0.660 | 0.205 | 0.281 | 2 rs16913 2 rs10512540 3 rs17763769 1 rs2109051 |
| | | | | | | | 3 rs1860316 3 rs9904090 4 rs1981647 2 rs1843622 |
| | | | | | | | 2 rs4584866 3 rs17791650 3 rs9891997 3 rs2191113 |
| chr17 | 66204022 | 6.39E−06 | 3.76E−05 | 0.683 | 0.115 | 0.160 | 2 rs9890889 4 rs2367005 2 rs2109054 3 rs17792120 |
| | | | | | | | 1 rs7221340 4 rs1486293 2 rs1486296 2 rs17763811 |
| | | | | | | | 4 rs9807096 3 rs10512541 3 rs8065001 2 rs4793501 |
| | | | | | | | 3 rs929474 3 rs9907514 |

*Associating alleles are indicated in front of each marker (Allelic code: A = 1, C = 2, G = 3, T = 4)

TABLE 5
Single markers and two marker haplotypes associated with Type 2
Diabetes in obese patients

| Chr | Pos | Punadj | Padj | Rrisk | Aff. frq | Ctrl. frq | Haplotype* |
|---|---|---|---|---|---|---|---|
| chr1 | 104818519 | 5.60E−06 | 2.85E−05 | 1.343 | 0.466 | 0.394 | 2 rs7553985 |
| chr1 | 104824377 | 4.76E−06 | 2.48E−05 | 1.346 | 0.466 | 0.393 | 4 rs2166890 |
| chr1 | 104825870 | 6.28E−06 | 3.14E−05 | 1.355 | 0.396 | 0.317 | 4 rs7552405 |
| chr3 | 147025256 | 7.11E−06 | 3.49E−05 | 1.696 | 0.097 | 0.059 | 3 rs7630694 |
| chr3 | 197065940 | 2.81E−06 | 1.58E−05 | 1.396 | 0.737 | 0.668 | 1 rs9858622 |
| chr4 | 140287637 | 4.41E−06 | 2.32E−05 | 1.431 | 0.804 | 0.741 | 1 rs13116075 1 rs6824182 |
| chr4 | 140364285 | 1.05E−05 | 4.86E−05 | 0.708 | 0.194 | 0.254 | 4 rs2292837 2 rs11725721 |
| chr4 | 140397800 | 8.21E−06 | 3.95E−05 | 0.704 | 0.194 | 0.254 | 3 rs3762864 2 rs11725721 |
| chr5 | 76586085 | 9.46E−06 | 4.46E−05 | 0.750 | 0.438 | 0.510 | 1 rs832785 1 rs2859576 |
| chr5 | 76586766 | 8.97E−06 | 4.26E−05 | 1.333 | 0.562 | 0.491 | 4 rs4704400 |
| chr6 | 9509965 | 7.50E−06 | 3.66E−05 | 1.335 | 0.495 | 0.424 | 4 rs214447 |
| chr6 | 22837279 | 1.03E−05 | 4.80E−05 | 1.430 | 0.824 | 0.766 | 2 rs10498713 3 rs4426986 |
| chr6 | 41191330 | 3.22E−06 | 1.77E−05 | 1.360 | 0.637 | 0.563 | 1 rs10456499 |
| chr8 | 128358773 | 4.94E−06 | 2.56E−05 | 0.692 | 0.190 | 0.254 | 2 rs283710 2 rs412835 |
| chr8 | 128362648 | 6.35E−07 | 4.42E−06 | 1.495 | 0.822 | 0.755 | 3 rs185852 |
| chr8 | 128376264 | 1.57E−06 | 9.59E−06 | 0.680 | 0.189 | 0.255 | 2 rs283718 1 rs283720 |
| chr9 | 126494483 | 2.67E−06 | 1.51E−05 | 1.591 | 0.139 | 0.092 | 4 rs3814120 |
| chr10 | 94301795 | 5.53E−07 | 3.93E−06 | 1.393 | 0.602 | 0.521 | 3 rs2421943 2 rs7917359 |
| chr10 | 94304784 | 8.39E−06 | 4.02E−05 | 0.747 | 0.427 | 0.499 | 3 rs7908111 3 rs2497304 |
| chr10 | 94309972 | 3.74E−06 | 2.01E−05 | 0.739 | 0.442 | 0.518 | 3 rs1999763 4 rs10882091 |
| chr10 | 94309972 | 3.74E−06 | 2.01E−05 | 0.739 | 0.442 | 0.518 | 3 rs1999763 3 rs6583830 |
| chr10 | 94337810 | 1.89E−06 | 1.12E−05 | 1.364 | 0.469 | 0.393 | 3 rs6583826 2 rs10882091 |
| chr10 | 94364357 | 1.76E−06 | 1.05E−05 | 1.363 | 0.486 | 0.410 | 2 rs10882091 3 rs7923837 |
| chr10 | 94364357 | 2.58E−06 | 1.47E−05 | 1.355 | 0.491 | 0.415 | 2 rs10882091 |
| chr10 | 94372930 | 2.66E−06 | 1.51E−05 | 1.355 | 0.491 | 0.416 | 4 rs7914814 |
| chr10 | 94388098 | 2.58E−06 | 1.47E−05 | 1.355 | 0.491 | 0.415 | 1 rs6583830 |
| chr10 | 94482696 | 1.62E−06 | 9.85E−06 | 1.363 | 0.562 | 0.485 | 1 rs2497304 |
| chr10 | 118562511 | 8.21E−06 | 3.95E−05 | 1.384 | 0.302 | 0.238 | 4 rs1681748 4 rs2170862 |
| chr10 | 118610986 | 9.43E−06 | 4.45E−05 | 1.367 | 0.320 | 0.256 | 4 rs2170862 |
| chr10 | 118880683 | 3.29E−06 | 1.80E−05 | 1.379 | 0.347 | 0.278 | 3 rs10787760 |
| chr11 | 106441899 | 8.79E−06 | 4.18E−05 | 1.533 | 0.142 | 0.097 | 4 rs1455593 |
| chr12 | 30340321 | 4.54E−06 | 2.38E−05 | 0.723 | 0.296 | 0.368 | 1 rs1429622 3 rs1506382 |
| chr14 | 81787150 | 3.94E−06 | 2.10E−05 | 1.363 | 0.439 | 0.365 | 1 rs799099 3 rs4899801 |
| chr14 | 81843593 | 8.25E−06 | 3.97E−05 | 1.339 | 0.437 | 0.367 | 3 rs2066041 |
| chr14 | 81899972 | 9.32E−06 | 4.40E−05 | 1.331 | 0.530 | 0.459 | 1 rs10483957 |
| chr14 | 87823315 | 9.69E−07 | 6.35E−06 | 1.605 | 0.891 | 0.836 | 3 rs419028 |
| chr16 | 24287484 | 6.15E−06 | 3.08E−05 | 1.388 | 0.372 | 0.300 | 1 rs11074618 2 rs985729 |
| chr19 | 3065864 | 1.02E−05 | 4.77E−05 | 1.433 | 0.825 | 0.767 | 3 rs3746069 |

*Associating alleles are indicated in front of each marker (Allelic code: A = 1, C = 2, G = 3, T = 4)

TABLE 6
Multi-marker haplotypes associated with Type 2 Diabetes in obese patients

| Chr | Pos | Punadj | Padj | Rrisk | Aff. frq | Ctrl. frq | Haplotype* |
|---|---|---|---|---|---|---|---|
| chr2 | 2591675 | 4.35E−06 | 2.29E−05 | 0.654 | 0.126 | 0.181 | 4 rs7576292 4 rs6548079 4 rs1451199 1 rs2385306 |
| | | | | | | | 2 rs1020530 1 rs12714359 2 rs7556672 3 rs1451198 |
| chr4 | 112032007 | 7.13E−06 | 3.50E−05 | 1.699 | 0.097 | 0.060 | 2 rs16997168 4 rs2723316 1 rs6419178 3 rs1448817 |
| | | | | | | | 3 rs2634073 2 rs2200733 2 rs2220427 2 rs13105878 |
| | | | | | | | 3 rs10033464 |
| chr8 | 128361033 | 7.34E−07 | 5.01E−06 | 0.671 | 0.178 | 0.244 | 3 rs283709 2 rs283710 2 rs4871780 1 rs185852 |
| | | | | | | | 2 rs412835 |
| chr10 | 68829632 | 4.50E−06 | 2.36E−05 | 2.428 | 0.039 | 0.017 | 4 rs7094426 1 rs1904614 3 rs10823028 3 rs2620924 |
| | | | | | | | 1 rs12359451 2 rs11815372 3 rs7083570 3 rs2394375 |
| | | | | | | | 2 rs1875151 4 rs10823057 4 rs6480272 3 rs1911356 |
| chr11 | 106076550 | 9.88E−06 | 4.63E−05 | 0.655 | 0.114 | 0.164 | 3 rs1791587 3 rs1793083 2 rs1791597 4 rs7104111 |
| | | | | | | | 2 rs1793064 1 rs4523664 2 rs623018 4 rs631214 |
| | | | | | | | 3 rs602159 2 rs10890568 2 rs4553343 4 rs1487906 |
| | | | | | | | 3 rs4121676 1 rs4121677 4 rs6588924 |
| chr13 | 94045239 | 4.93E−06 | 2.55E−05 | 0.058 | 0.001 | 0.012 | 1 rs726298 2 rs7339106 1 rs9556403 2 rs9590039 |
| | | | | | | | 2 rs6492722 1 rs1572935 3 rs6492725 |
| chr14 | 81810554 | 9.82E−07 | 6.42E−06 | 1.408 | 0.341 | 0.269 | 4 rs9323719 2 rs7143860 3 rs709900 2 rs10135954 |
| | | | | | | | 1 rs799103 1 rs799099 3 rs8018202 4 rs709915 |
| | | | | | | | 3 rs709918 3 rs2066041 1 rs1457990 3 rs4899801 |
| | | | | | | | 1 rs10483957 |
| chr15 | 63410029 | 6.68E−06 | 3.31E−05 | 2.395 | 0.047 | 0.020 | 4 rs2019185 2 rs920688 1 rs894494 3 rs665287 |
| | | | | | | | 1 rs626163 2 rs639812 2 rs894491 1 rs581427 |
| | | | | | | | 4 rs603439 1 rs678113 2 rs602192 3 rs7182756 |
| | | | | | | | 1 rs2280345 3 rs11071841 1 rs2277582 |
| chr15 | 95944049 | 4.24E−06 | 2.25E−05 | 0.593 | 0.079 | 0.127 | 2 rs8029926 4 rs649034 4 rs2036348 |
| chr18 | 38114511 | 4.94E−06 | 2.56E−05 | 0.555 | 0.055 | 0.094 | 4 rs9304267 3 rs3763494 1 rs882291 2 rs898785 |
| | | | | | | | 3 rs11082268 4 rs8088748 2 rs10502781 3 rs717127 |
| chr20 | 45233401 | 3.10E−06 | 1.71E−05 | 1.397 | 0.322 | 0.254 | 1 rs6063073 4 rs6066209 3 rs2018876 2 rs3092781 |
| | | | | | | | 4 rs6122563 3 rs8126262 1 rs6063083 3 rs6018337 |
| | | | | | | | 4 rs7262634 |

*Associating alleles are indicated in front of each marker (Allelic code: A = 1, C = 2, G = 3, T = 4)

### Chromosome 6p22.3 Locus

[0259] One of the most significant association signals for non-obese diabetic patients was identified by two single markers (rs1569699 and rs7756992) and two 2 marker haplotypes mapping to chromosome 6p22.3 (Table 3). These markers are located within one LD block at position 20634996-20836710 bases (NCBI Build 35) between markers rs4429936 and rs6908425 (SEQ ID NO:1; FIG. 1). This LD block contains the 5′ end including exons 1-5 of the gene CDK5 regulatory subunit associated protein 1-like 1 (CDKAL1) (NM_{—}017774). The CDKAL1 protein has catalytic activity as well as iron ion binding activity but the in vivo function in unknown. It is widely expressed including expression in pancreas.

[0260] To verify the association of rs1569699 and rs7756992 to Type 2 diabetes the two markers were genotyped in a Danish Type 2 diabetes case—control cohort and also in a US Caucasian cohort Type 2 diabetes cohort from the PENN CATH study (Table 7). The results show that the two markers are significantly associated with Type 2 diabetes in the Danish cohort and that it confers a similar risk in the US UPenn. cohort although the results do not reach statistical significance. When the two replication cohorts are combined the results are significant with a risk of around 1.2. When all the cohorts are combined the risk for each marker is over 1.2 comparing a group of nearly 3000 Type 2 diabetes patients (not accounting for BMI) and over 8000 controls. These results are genome wide significant.

TABLE 7
Association of rs1569699 and rs7756992 to Type 2 diabetes
Iceland

| rs-Name | Allele | Chr | Pos (B35) | Aff. n | Aff. frq | Ctrl. n | Ctrl. frq | Rrisk | Padj |
|---|---|---|---|---|---|---|---|---|---|
| rs1569699 | 2 | chr6 | 20787289 | 1397 | 0.297 | 5264 | 0.256 | 1.224 | 0.000158 |
| rs7756992 | 3 | chr6 | 20787688 | 1398 | 0.270 | 5271 | 0.232 | 1.228 | 0.000204 |

Denmark (Steno)

| rs-Name | Allele | Chr | Pos (B35) | Aff. n | Aff. frq | Ctrl. n | Ctrl. frq | Rrisk | P |
|---|---|---|---|---|---|---|---|---|---|
| rs1569699 | 2 | chr6 | 20787289 | 1108 | 0.361 | 2346 | 0.321 | 1.200 | 0.00079 |
| rs7756992 | 3 | chr6 | 20787688 | 1131 | 0.320 | 2361 | 0.274 | 1.247 | 0.000078 |

Upenn

| rs-Name | Allele | Chr | Pos (B35) | Aff. n | Aff. frq | Ctrl. n | Ctrl. frq | Rrisk | P |
|---|---|---|---|---|---|---|---|---|---|
| rs1569699 | 2 | chr6 | 20787289 | 360 | 0.346 | 522 | 0.308 | 1.185 | 0.09944 |
| rs7756992 | 3 | chr6 | 20787688 | 392 | 0.293 | 690 | 0.261 | 1.176 | 0.103824 |

Combined replication cohorts

| rs-Name | Allele | Chr | Pos (B35) | Aff. n | Aff. frq | Ctrl. n | Ctrl. frq | Rrisk | Pmh |
|---|---|---|---|---|---|---|---|---|---|
| rs1569699 | 2 | chr6 | 20787289 | 1468 | — | 2868 | — | 1.195 | 0.00002 |
| rs7756992 | 3 | chr6 | 20787688 | 1523 | — | 3051 | — | 1.221 | 2.8E−06 |

Combined all cohorts

| rs-Name | Allele | Chr | Pos (B35) | Aff. n | Aff. frq | Ctrl. n | Ctrl. frq | Rrisk | Pmh |
|---|---|---|---|---|---|---|---|---|---|
| rs1569699 | 2 | chr6 | 20787289 | 2865 | — | 8132 | — | 1.207 | 1.1E−07 |
| rs7756992 | 3 | chr6 | 20787688 | 2921 | — | 8322 | — | 1.224 | 1.9E−09 |

These results show significant association to the 20634996-20836710 by region (Build 34) on chromosome 6, between markers rs4429936 and rs6908425, in Type 2 diabetes. Values for relative risk (RR) are comparable in all three cohorts; the lack of significant association at the 0.05-level in the UPenn cohort is mainly due to lack of power compared with the other cohorts, although the RR value is slightly lower in this cohort as compared with Iceland (RR of 1.185 compared with 1.224 for rs1569699). Furthermore, RR-values for non-obese Type 2 diabetes patients in Iceland are even higher (RR=1.33 for rs1569699).

### Chromosome 10q23.33 Locus

[0261] Seven single markers and seven two marker haplotypes in a region on chromosome 10q23.33 were found to be associated with Type 2 diabetes (Table 1). Most of those markers are also associated to diabetes with elevated RR values when obese patients are analysed separately (Table 5). These markers are located within one LD block between positions 94192885 and 94490091 (NCBI Build 35), corresponding to the genomic segment bridged by markers rs2798253 and rs11187152 (FIG. 2). This LD block contains three genes, Insulin-degrading enzyme (IDE) (NM_{—}004969), Kinesin family member 11 (KIF11) (NM_{—}004523) and Homeobox, hematopoietically expressed (HHEX) (NM_{—}002729).

[0262] IDE may belong to a protease family responsible for intercellular peptide signalling. Though its role in the cellular processing of insulin has not yet been defined, insulin-degrading enzyme is thought to be involved in the termination of the insulin response (Fakhrai-Rad et al, Human Molecular Genetics 9:2149-2158, 2000). Genetic analysis of the diabetic GK rat has revealed 2 amino acid substitutions in the IDE gene (H18R and A890V) in the GK allele which reduced insulin-degrading activity by 31% in transfected cells. However, when the H18R and A890V variants were studied separately, no effects were observed, suggesting a synergistic effect of the 2 variants on insulin degradation. No effect on insulin degradation was observed in cell lysates, suggesting that the effect may be coupled to receptor-mediated internalization of insulin. Congenic rats with the IDE GK allele displayed postprandial hyperglycemia, reduced lipogenesis in fat cells, blunted insulin-stimulated glucose transmembrane uptake, and reduced insulin degradation in isolated muscle. Analysis of additional rat strains demonstrated that the dysfunctional IDE allele was unique to GK rats. The authors concluded that IDE plays an important role in the diabetic phenotype in GK rats. IDE has been studied as a candidate gene for Type 2 diabetes in humans with inconsistent results. Two large studies have recently analysed the association of IDE to Type 2 diabetes by mutation screening and haplotype analysis using tagging SNPs over the gene (Groves et al, Diabetes 52:1300-1305, 2003; Florez et al, Diabetes 55:128-135, 2006). Both studies conclude that common variants in IDE are unlikely to confer significant risk of Type 2 diabetes. These studies did however, not include the whole LD block as defined in FIG. 2 and at least some of the markers identified in our study as associated with Type 2 diabetes are outside the regions analysed in those previous studies. Based on the results reported here, markers in LD with IDE are associated with Type 2 diabetes, providing genetic evidence for the role of IDE in the etiology of Type 2 diabetes.

[0263] KIF11 encodes a motor protein that belongs to the kinesin-like protein family. Members of this protein family are known to be involved in various kinds of spindle dynamics. The function of this gene product includes chromosome positioning, centrosome separation and establishing a bipolar spindle during cell mitosis. This gene is not a good functional candidate for diabetes but has to be considered as a positional candidate due to its location within the associated LD block.

[0264] HHEX encodes a member of the homeobox family of transcription factors, many of which are involved in developmental processes. Expression in specific hematopoietic lineages suggests that this protein may play a role in hematopoietic differentiation. HHEX is essential for pancreatic development; in HHEX negative mouse embryos there is a complete failure in ventral pancreatic specification (Bort et al, Development 131, 797-806, 2004). Other transcription factors involved in pancreatic development include the MODY genes as well as other factors that have been implicated in late onset diabetes. HHEX is also an essential effector of Wnt antagonist for heart induction (Foley and Mercola, GENES & DEVELOPMENT 19:387-396, 2005). This puts HHEX in the same pathway as the recently established Type 2 diabetes gene TCF7L2 and together these data make HHEX a functional as well as positional candidate for Type 2 diabetes.

[0265] To verify the association of rs2497304, rs947591, rs10882091 and rs7914814 to Type 2 diabetes, the markers were genotyped in a Danish Type 2 diabetes case—control cohort and also in a US Caucasian cohort Type 2 diabetes cohort from the PENN CATH study (Table 8). The results show that the association is not replicated in either cohort independently. However, when the two cohorts are combined the association of rs947591 reaches significance at the 0.05 level, with a risk of 1.1 in the combined cohort. When all the cohorts are combined the risk is 1.15 for the rs947591 marker.

[0266] These results indicate that variants within the LD block on Chromosome 10 that includes IDE and HHEX are susceptibility variants for Type 2 diabetes.

TABLE 8
Association analysis of markers on Chromosome 10 to Type 2 diabetes in
Iceland, Denmark, and the US.
Iceland

| rs-Name | Allele | Chr | Pos (B35) | Aff. n | Aff. frq | Ctrl. n | Ctrl. frq | Rrisk | Padj |
|---|---|---|---|---|---|---|---|---|---|
| rs10882091 | 2 | chr10 | 94364357 | 1399 | 0.472 | 5275 | 0.415 | 1.257 | 0.0000023 |
| rs7914814 | 4 | chr10 | 94372930 | 1399 | 0.472 | 5275 | 0.416 | 1.256 | 0.0000024 |
| rs2497304 | 1 | chr10 | 94482696 | 1399 | 0.542 | 5275 | 0.485 | 1.257 | 0.0000019 |
| rs947591 | 1 | chr10 | 94485733 | 1399 | 0.526 | 5273 | 0.475 | 1.226 | 0.0000221 |

Denmark (Steno)

| rs-Name | Allele | Chr | Pos (B35) | Aff. n | Aff. frq | Ctrl. n | Ctrl. frq | Rrisk | P |
|---|---|---|---|---|---|---|---|---|---|
| rs10882091 | 2 | chr10 | 94364357 | 1115 | 0.431 | 2341 | 0.413 | 1.077 | 0.15 |
| rs7914814 | 4 | chr10 | 94372930 | 1141 | 0.430 | 2360 | 0.410 | 1.088 | 0.10 |
| rs2497304 | 1 | chr10 | 94482696 | 1145 | 0.528 | 2348 | 0.509 | 1.079 | 0.14 |
| rs947591 | 1 | chr10 | 94485733 | 1140 | 0.502 | 2361 | 0.478 | 1.103 | 0.055 |

Upenn

| rs-Name | Allele | Chr | Pos (B35) | Aff. n | Aff. frq | Ctrl. n | Ctrl. frq | Rrisk | P |
|---|---|---|---|---|---|---|---|---|---|
| rs10882091 | 2 | chr10 | 94364357 | 386 | 0.377 | 640 | 0.375 | 1.008 | 0.93 |
| rs7914814 | 4 | chr10 | 94372930 | 394 | 0.379 | 683 | 0.381 | 0.995 | 0.95 |
| rs2497304 | 1 | chr10 | 94482696 | 408 | 0.460 | 778 | 0.454 | 1.021 | 0.81 |
| rs947591 | 1 | chr10 | 94485733 | 393 | 0.480 | 687 | 0.459 | 1.089 | 0.34 |

Combined replication cohorts

| rs-Name | Allele | Chr | Pos (B35) | Aff. n | Aff. frq | Ctrl. n | Ctrl. frq | Rrisk | Pmh |
|---|---|---|---|---|---|---|---|---|---|
| rs10882091 | 2 | chr10 | 94364357 | 1501 | — | 2981 | — | 1.052 | 0.19 |
| rs7914814 | 4 | chr10 | 94372930 | 1535 | — | 3043 | — | 1.053 | 0.16 |
| rs2497304 | 1 | chr10 | 94482696 | 1553 | — | 3126 | — | 1.057 | 0.16 |
| rs947591 | 1 | chr10 | 94485733 | 1533 | — | 3048 | — | 1.098 | 0.032 |

Combined all cohorts

| rs-Name | Allele | Chr | Pos (B35) | Aff. n | Aff. frq | Ctrl. n | Ctrl. frq | Rrisk | Pmh |
|---|---|---|---|---|---|---|---|---|---|
| rs10882091 | 2 | chr10 | 94364357 | 2900 | — | 8256 | — | 1.136 | 0.000017 |
| rs7914814 | 4 | chr10 | 94372930 | 2934 | — | 8318 | — | 1.137 | 0.000012 |
| rs2497304 | 1 | chr10 | 94482696 | 2952 | — | 8401 | — | 1.139 | 0.000011 |
| rs947591 | 1 | chr10 | 94485733 | 2932 | — | 8321 | — | 1.152 | 9.7E−07 |

### Chromosome 17q24.3 Locus

[0267] Five single markers and two two marker haplotypes in a region of chromosome 17q24.3 were found to be associated with Type 2 diabetes in non-obese patients (Table 3). Some of these markers show the strongest association reported in Table 3 and association to this region was also observed when all diabetics were analysed (Table 1). These markers are located within two adjacent LD blocks located between positions 66037656 and 66163076 (NCBI Build 35) on chromosome 17, between markers rs11077501 and rs4793497 (FIG. 3). The association is significant after correction for the number of tests performed in the single marker association analysis; i.e., the association is significant at the genome-wide level. No known genes are located within these LD blocks. However, it is possible that variants in this region affect genes in neighboring regions including KCNJ2 and KCNJ16. Alternatively these variants may affect unknown genes within these LD block regions.

TABLE 9
SNPs located within the CDKAL1 gene (Located between position
20,642,736 and 21,340,611 bp on Chromosome 6 in NCBI Build
35 and NCBI Build 36)

| Pos | |
|---|---|
| Build | |
| 35/36 | Marker ID |
| 20642787 | rs41271303 |
| 20642953 | rs11963450 |
| 20643397 | rs981043 |
| 20643513 | rs981042 |
| 20643675 | rs16883895 |
| 20643753 | rs17512225 |
| 20643840 | rs35035071 |
| 20643949 | rs6904566 |
| 20644073 | rs6927356 |
| 20644093 | rs35281412 |
| 20644313 | rs35915788 |
| 20644314 | rs34025398 |
| 20644319 | rs34361235 |
| 20644335 | rs6905138 |
| 20644499 | rs13194858 |
| 20644717 | rs2179551 |
| 20644727 | rs2179550 |
| 20644787 | rs9465794 |
| 20644787 | rs9465795 |
| 20644848 | rs7747962 |
| 20644858 | rs6910725 |
| 20644918 | rs965054 |
| 20644971 | rs2143407 |
| 20645032 | rs10619380 |
| 20645431 | rs2328525 |
| 20645661 | rs13199286 |
| 20645841 | rs10611252 |
| 20645940 | rs7753499 |
| 20646023 | rs7753956 |
| 20646024 | rs34811195 |
| 20646024 | rs7753670 |
| 20646107 | rs3060613 |
| 20646109 | rs11277970 |
| 20646110 | rs11280099 |
| 20646114 | rs6149468 |
| 20646139 | rs16883900 |
| 20646175 | rs7774291 |
| 20646441 | rs10612082 |
| 20646476 | rs9368198 |
| 20646502 | rs13203336 |
| 20646504 | rs13203631 |
| 20646619 | rs6456355 |
| 20646644 | rs10484635 |
| 20647190 | rs12204173 |
| 20647320 | rs13207544 |
| 20647851 | rs12198728 |
| 20647984 | rs28396084 |
| 20648327 | rs12199073 |
| 20648500 | rs9465796 |
| 20648561 | rs12212600 |
| 20648596 | rs13212040 |
| 20648663 | rs35291340 |
| 20648722 | rs12199324 |
| 20649085 | rs12200871 |
| 20649159 | rs9348432 |
| 20649183 | rs12200834 |
| 20649236 | rs34860173 |
| 20649324 | rs11754872 |
| 20649498 | rs6456356 |
| 20649517 | rs9368199 |
| 20649682 | rs2143406 |
| 20650176 | rs10484634 |
| 20650200 | rs7758851 |
| 20650398 | rs34677076 |
| 20651447 | rs6928571 |
| 20651461 | rs12192584 |
| 20651608 | rs34856684 |
| 20652015 | rs9350255 |
| 20652091 | rs9368200 |
| 20652136 | rs12214002 |
| 20652245 | rs9465797 |
| 20652300 | rs9465798 |
| 20652574 | rs28699301 |
| 20652650 | rs13215844 |
| 20652678 | rs12214315 |
| 20652722 | rs11759517 |
| 20652786 | rs13218957 |
| 20652806 | rs13218962 |
| 20653186 | rs10543744 |
| 20653201 | rs12216047 |
| 20653447 | rs9366354 |
| 20653890 | rs9358342 |
| 20654091 | rs9368201 |
| 20654382 | rs34206163 |
| 20654506 | rs9465799 |
| 20654794 | rs34187071 |
| 20654867 | rs9465800 |
| 20654890 | rs6908974 |
| 20654992 | rs13197372 |
| 20655361 | rs13214145 |
| 20655793 | rs16883910 |
| 20655968 | rs12194705 |
| 20656271 | rs35080661 |
| 20656465 | rs7753467 |
| 20656466 | rs7773488 |
| 20656986 | rs34182285 |
| 20657084 | rs34242699 |
| 20657780 | rs9348433 |
| 20657942 | rs9460519 |
| 20658083 | rs12198377 |
| 20658096 | rs9465801 |
| 20658195 | rs9465802 |
| 20658822 | rs28458932 |
| 20658823 | rs9465803 |
| 20658981 | rs2103682 |
| 20659321 | rs9465804 |
| 20659580 | rs34611621 |
| 20660058 | rs12055423 |
| 20660653 | rs9465805 |
| 20660829 | rs11365187 |
| 20660836 | rs11320714 |
| 20660918 | rs9350256 |
| 20661764 | rs7756211 |
| 20662069 | rs9460520 |
| 20662498 | rs34245467 |
| 20662930 | rs9350257 |
| 20663855 | rs11964554 |
| 20663990 | rs9465806 |
| 20664109 | rs11964635 |
| 20664190 | rs13199421 |
| 20664314 | rs6932320 |
| 20664570 | rs12200078 |
| 20664659 | rs13437555 |
| 20664884 | rs9350258 |
| 20665256 | rs12176441 |
| 20665260 | rs12183826 |
| 20665264 | rs9356738 |
| 20665272 | rs9348434 |
| 20665343 | rs9465807 |
| 20665804 | rs4458667 |
| 20665995 | rs7739402 |
| 20667590 | rs16883914 |
| 20667591 | rs16883916 |
| 20667900 | rs9654584 |
| 20667999 | rs9465808 |
| 20668414 | rs17584626 |
| 20668565 | rs7751682 |
| 20669667 | rs11361279 |
| 20669681 | rs34634263 |
| 20670059 | rs12214549 |
| 20670364 | rs7753519 |
| 20670575 | rs28567007 |
| 20670597 | rs7772137 |
| 20670719 | rs12208597 |
| 20670998 | rs9368202 |
| 20671877 | rs2328526 |
| 20672452 | rs34823358 |
| 20673287 | rs28639914 |
| 20673363 | rs34233572 |
| 20673415 | rs4712506 |
| 20673935 | rs13203450 |
| 20674280 | rs9350259 |
| 20674435 | rs6918457 |
| 20674595 | rs35210537 |
| 20674749 | rs11329887 |
| 20675016 | rs9348435 |
| 20675068 | rs35366106 |
| 20675342 | rs16901563 |
| 20675352 | rs12333229 |
| 20675520 | rs9460521 |
| 20676092 | rs10589899 |
| 20676351 | rs2876573 |
| 20676957 | rs6935461 |
| 20676963 | rs6935465 |
| 20676968 | rs10603174 |
| 20677060 | rs12333291 |
| 20677967 | rs2064321 |
| 20677985 | rs35546893 |
| 20678018 | rs4291090 |
| 20678121 | rs2064320 |
| 20678268 | rs9465810 |
| 20678275 | rs9465811 |
| 20678423 | rs9358344 |
| 20678756 | rs10946390 |
| 20679114 | rs6905281 |
| 20679339 | rs16883932 |
| 20679612 | rs34904067 |
| 20679660 | rs7744002 |
| 20679763 | rs35142564 |
| 20680095 | rs9465812 |
| 20680678 | rs7759094 |
| 20680784 | rs9460522 |
| 20681538 | rs7764551 |
| 20681585 | rs10541455 |
| 20682409 | rs16883935 |
| 20682542 | rs13215603 |
| 20682568 | rs962576 |
| 20683235 | rs1474720 |
| 20683797 | rs16883944 |
| 20684155 | rs34538343 |
| 20684269 | rs9350260 |
| 20684353 | rs16883951 |
| 20684645 | rs9358345 |
| 20684862 | rs1012627 |
| 20684890 | rs9368203 |
| 20684939 | rs35894322 |
| 20684965 | rs4710932 |
| 20684984 | rs6909117 |
| 20685540 | rs1012626 |
| 20685748 | rs1012625 |
| 20685760 | rs7752194 |
| 20685958 | rs9465813 |
| 20686014 | rs12207923 |
| 20686355 | rs16883963 |
| 20686831 | rs13205786 |
| 20686887 | rs35205364 |
| 20687102 | rs10456232 |
| 20687189 | rs9465814 |
| 20687201 | rs35571892 |
| 20687740 | rs9465815 |
| 20687753 | rs36119371 |
| 20687921 | rs28621813 |
| 20687926 | rs9350261 |
| 20687928 | rs7341226 |
| 20688175 | rs6927481 |
| 20688323 | rs35313444 |
| 20688373 | rs6928198 |
| 20688404 | rs6907897 |
| 20688545 | rs6928586 |
| 20688872 | rs9368204 |
| 20689021 | rs9358346 |
| 20689589 | rs11967546 |
| 20689593 | rs34134803 |
| 20689772 | rs10456233 |
| 20689807 | rs7744833 |
| 20690122 | rs9460523 |
| 20690123 | rs9465816 |
| 20690432 | rs6908077 |
| 20690630 | rs9465817 |
| 20691069 | rs11967445 |
| 20691263 | rs34022950 |
| 20691793 | rs9460524 |
| 20691994 | rs34020592 |
| 20692003 | rs11448102 |
| 20692339 | rs9465818 |
| 20692402 | rs9350262 |
| 20692513 | rs13205241 |
| 20693000 | rs12153939 |
| 20693100 | rs6925593 |
| 20693119 | rs4712507 |
| 20693225 | rs10558806 |
| 20693267 | rs35982532 |
| 20693276 | rs11385529 |
| 20693360 | rs9348436 |
| 20693416 | rs9368206 |
| 20693438 | rs13209542 |
| 20693452 | rs9368207 |
| 20693630 | rs13209907 |
| 20693635 | rs6926658 |
| 20694018 | rs12213132 |
| 20694182 | rs4357125 |
| 20694554 | rs6932944 |
| 20694607 | rs6932962 |
| 20695026 | rs9348437 |
| 20695332 | rs12201857 |
| 20695356 | rs9465819 |
| 20695447 | rs6938955 |
| 20695539 | rs9460525 |
| 20695827 | rs9465820 |
| 20695964 | rs10946391 |
| 20695968 | rs9368208 |
| 20696003 | rs9465821 |
| 20696183 | rs6923790 |
| 20696399 | rs10558139 |
| 20697309 | rs6907459 |
| 20697320 | rs6907767 |
| 20697321 | rs9465822 |
| 20697349 | rs6930283 |
| 20697706 | rs6908042 |
| 20697741 | rs6935317 |
| 20697761 | rs35370102 |
| 20698266 | rs9368209 |
| 20698366 | rs13216746 |
| 20698367 | rs13216747 |
| 20699007 | rs35485532 |
| 20699747 | rs13216324 |
| 20699817 | rs4336434 |
| 20700046 | rs4509107 |
| 20700428 | rs9465823 |
| 20700465 | rs6936705 |
| 20700679 | rs34023799 |
| 20700929 | rs6942313 |
| 20701057 | rs28869917 |
| 20701318 | rs34982231 |
| 20701631 | rs9358349 |
| 20701770 | rs9460526 |
| 20701829 | rs9366356 |
| 20702163 | rs36120092 |
| 20702181 | rs9465824 |
| 20702519 | rs4712512 |
| 20702561 | rs4712513 |
| 20702646 | rs4710934 |
| 20702658 | rs9348438 |
| 20702902 | rs9460529 |
| 20703363 | rs13199587 |
| 20703470 | rs13199384 |
| 20703526 | rs10223680 |
| 20703606 | rs9350263 |
| 20703768 | rs9465825 |
| 20703832 | rs10223876 |
| 20704100 | rs35702271 |
| 20704171 | rs9358350 |
| 20704432 | rs12208985 |
| 20704771 | rs12210459 |
| 20704892 | rs35431707 |
| 20705144 | rs36039523 |
| 20705297 | rs11758281 |
| 20705350 | rs28893199 |
| 20705757 | rs34256347 |
| 20706019 | rs12192740 |
| 20706282 | rs13212326 |
| 20706486 | rs12199184 |
| 20706753 | rs10456234 |
| 20707009 | rs4712514 |
| 20707422 | rs9465826 |
| 20707607 | rs9366357 |
| 20707867 | rs2294809 |
| 20708549 | rs2294808 |
| 20708813 | rs7762750 |
| 20708976 | rs4712515 |
| 20708998 | rs10522824 |
| 20708999 | rs35660518 |
| 20709002 | rs10679950 |
| 20709003 | rs34870864 |
| 20709022 | rs4712516 |
| 20709145 | rs4710935 |
| 20709386 | rs9465827 |
| 20709388 | rs12204865 |
| 20709672 | rs10946393 |
| 20709764 | rs12209806 |
| 20709894 | rs10946394 |
| 20709921 | rs1997778 |
| 20709971 | rs35878587 |
| 20710359 | rs1997777 |
| 20710378 | rs2223622 |
| 20710776 | rs11964057 |
| 20711246 | rs9460530 |
| 20711344 | rs9460531 |
| 20711376 | rs34329159 |
| 20711640 | rs7764558 |
| 20711804 | rs4710936 |
| 20712056 | rs12213940 |
| 20712228 | rs13215038 |
| 20712739 | rs10946395 |
| 20712832 | rs6939917 |
| 20712975 | rs9358351 |
| 20713800 | rs6925097 |
| 20713924 | rs9465828 |
| 20713955 | rs9465829 |
| 20713961 | rs6902661 |
| 20714057 | rs34373680 |
| 20714281 | rs35051096 |
| 20714508 | rs932405 |
| 20714591 | rs6926585 |
| 20714635 | rs3938395 |
| 20715464 | rs11964664 |
| 20715551 | rs35964987 |
| 20715663 | rs12206413 |
| 20715758 | rs35990187 |
| 20715763 | rs4991654 |
| 20715910 | rs9460532 |
| 20715991 | rs13328250 |
| 20716030 | rs13328252 |
| 20716194 | rs4712517 |
| 20716257 | rs4712518 |
| 20717220 | rs7758129 |
| 20717475 | rs13206462 |
| 20717483 | rs13192442 |
| 20717486 | rs13206468 |
| 20717492 | rs13192445 |
| 20717498 | rs13192450 |
| 20717504 | rs13206477 |
| 20717510 | rs13206483 |
| 20717577 | rs12179168 |
| 20717586 | rs12180975 |
| 20717611 | rs12179172 |
| 20717860 | rs12179563 |
| 20718357 | rs11355836 |
| 20718696 | rs2328527 |
| 20718709 | rs11452882 |
| 20718920 | rs2876574 |
| 20719905 | rs9465831 |
| 20720031 | rs34877824 |
| 20720290 | rs13212501 |
| 20720647 | rs9358352 |
| 20720703 | rs9358353 |
| 20720761 | rs28756205 |
| 20720889 | rs9350265 |
| 20720989 | rs7750508 |
| 20721130 | rs7771052 |
| 20721141 | rs9460533 |
| 20721195 | rs13200415 |
| 20721216 | rs10550932 |
| 20721312 | rs9465832 |
| 20721463 | rs9368211 |
| 20721471 | rs9350266 |
| 20721507 | rs11752592 |
| 20721515 | rs9350267 |
| 20721754 | rs978988 |
| 20721898 | rs978987 |
| 20721906 | rs978986 |
| 20722036 | rs5874773 |
| 20722196 | rs5874774 |
| 20722500 | rs7756788 |
| 20722659 | rs9348439 |
| 20722661 | rs9356739 |
| 20722693 | rs9356740 |
| 20722738 | rs7760894 |
| 20723021 | rs2796913 |
| 20723046 | rs2608613 |
| 20723121 | rs10456710 |
| 20723139 | rs9476286 |
| 20723140 | rs28368538 |
| 20723140 | rs9476287 |
| 20723141 | rs28612622 |
| 20723142 | rs9463660 |
| 20723146 | rs9463661 |
| 20723162 | rs9461022 |
| 20723193 | rs9461021 |
| 20723235 | rs34980442 |
| 20723239 | rs34049080 |
| 20723258 | rs35218684 |
| 20723260 | rs12175876 |
| 20723270 | rs10948323 |
| 20723287 | rs34400313 |
| 20723292 | rs36081550 |
| 20723304 | rs12175878 |
| 20723305 | rs34520184 |
| 20723305 | rs34756989 |
| 20723322 | rs4629736 |
| 20723322 | rs9296917 |
| 20723324 | rs28562027 |
| 20723333 | rs9381823 |
| 20723346 | rs34769771 |
| 20723346 | rs34774640 |
| 20723346 | rs36038896 |
| 20723365 | rs13209195 |
| 20723369 | rs12213541 |
| 20723369 | rs34112320 |
| 20723371 | rs34615869 |
| 20723379 | rs35949519 |
| 20723381 | rs9257498 |
| 20723383 | rs34200576 |
| 20723393 | rs4960519 |
| 20723396 | rs9261905 |
| 20723402 | rs9267103 |
| 20723404 | rs17367677 |
| 20723416 | rs9261906 |
| 20723421 | rs9267104 |
| 20723424 | rs9267105 |
| 20723434 | rs28810763 |
| 20723438 | rs12179121 |
| 20723438 | rs4714959 |
| 20723439 | rs10946636 |
| 20723439 | rs28763327 |
| 20723439 | rs28847950 |
| 20723439 | rs3933247 |
| 20723449 | rs28808723 |
| 20723451 | rs9767082 |
| 20723452 | rs35132675 |
| 20723452 | rs35517166 |
| 20723452 | rs4714297 |
| 20723456 | rs12182737 |
| 20723456 | rs36163804 |
| 20723460 | rs35790973 |
| 20723464 | rs35236694 |
| 20723469 | rs35567559 |
| 20723469 | rs9267106 |
| 20723471 | rs9800557 |
| 20723484 | rs12182463 |
| 20723489 | rs10948322 |
| 20723489 | rs34052284 |
| 20723489 | rs9268999 |
| 20723490 | rs9258377 |
| 20723495 | rs9257499 |
| 20723498 | rs9265816 |
| 20723500 | rs28771402 |
| 20723501 | rs28771401 |
| 20723502 | rs12194731 |
| 20723502 | rs4451188 |
| 20723502 | rs9717323 |
| 20723502 | rs9765920 |
| 20723503 | rs9265815 |
| 20723504 | rs28771400 |
| 20723506 | rs12190813 |
| 20723506 | rs12215416 |
| 20723507 | rs12178527 |
| 20723510 | rs35234761 |
| 20723510 | rs35887156 |
| 20723512 | rs28797321 |
| 20723515 | rs28771399 |
| 20723522 | rs13207682 |
| 20723522 | rs36099432 |
| 20723531 | rs28749543 |
| 20723535 | rs13196506 |
| 20723535 | rs35716308 |
| 20723536 | rs28831180 |
| 20723536 | rs34938144 |
| 20723537 | rs36142967 |
| 20723541 | rs35313792 |
| 20723542 | rs9260904 |
| 20723543 | rs34597832 |
| 20723545 | rs9767740 |
| 20723546 | rs28771398 |
| 20723550 | rs34384951 |
| 20723554 | rs12524128 |
| 20723554 | rs12665124 |
| 20723554 | rs34922643 |
| 20723555 | rs9260903 |
| 20723557 | rs28771397 |
| 20723557 | rs6915279 |
| 20723559 | rs9261907 |
| 20723559 | rs9766798 |
| 20723559 | rs9767242 |
| 20723560 | rs6914835 |
| 20723560 | rs9260902 |
| 20723560 | rs9767101 |
| 20723562 | rs9261908 |
| 20723563 | rs12207064 |
| 20723563 | rs12213193 |
| 20723563 | rs35750154 |
| 20723566 | rs9260901 |
| 20723570 | rs9269000 |
| 20723579 | rs12178368 |
| 20723579 | rs13197714 |
| 20723579 | rs28771396 |
| 20723579 | rs34443697 |
| 20723579 | rs9267107 |
| 20723582 | rs35113301 |
| 20723582 | rs3933248 |
| 20723583 | rs28819830 |
| 20723586 | rs10947899 |
| 20723586 | rs9260900 |
| 20723588 | rs13204671 |
| 20723588 | rs34094007 |
| 20723588 | rs34963756 |
| 20723588 | rs4304158 |
| 20723589 | rs4298351 |
| 20723590 | rs12182307 |
| 20723590 | rs12201487 |
| 20723590 | rs34097573 |
| 20723595 | rs13219021 |
| 20723596 | rs34456153 |
| 20723596 | rs9767597 |
| 20723597 | rs9767102 |
| 20723598 | rs9269001 |
| 20723601 | rs12180097 |
| 20723603 | rs12178465 |
| 20723603 | rs35128115 |
| 20723607 | rs4273681 |
| 20723609 | rs12193754 |
| 20723617 | rs813814 |
| 20723617 | rs9689672 |
| 20723619 | rs36173068 |
| 20723623 | rs12202172 |
| 20723623 | rs28862376 |
| 20723625 | rs12178884 |
| 20723625 | rs12203117 |
| 20723625 | rs34250588 |
| 20723626 | rs12182581 |
| 20723632 | rs34147797 |
| 20723635 | rs9688484 |
| 20723636 | rs9269002 |
| 20723636 | rs9767733 |
| 20723637 | rs10948989 |
| 20723637 | rs34732676 |
| 20723637 | rs9260899 |
| 20723638 | rs35686233 |
| 20723639 | rs11753098 |
| 20723639 | rs35156647 |
| 20723646 | rs34719653 |
| 20723646 | rs35575623 |
| 20723648 | rs12192046 |
| 20723649 | rs11759854 |
| 20723649 | rs28771395 |
| 20723649 | rs35563402 |
| 20723649 | rs36016334 |
| 20723649 | rs4555911 |
| 20723653 | rs11965757 |
| 20723654 | rs10948990 |
| 20723654 | rs28808296 |
| 20723654 | rs34995142 |
| 20723654 | rs809919 |
| 20723657 | rs11571978 |
| 20723659 | rs12208488 |
| 20723662 | rs11751374 |
| 20723663 | rs13217613 |
| 20723667 | rs12528735 |
| 20723668 | rs35160656 |
| 20723668 | rs35322569 |
| 20723668 | rs9766221 |
| 20723670 | rs35120225 |
| 20723670 | rs511868 |
| 20723674 | rs9269003 |
| 20723675 | rs34290316 |
| 20723675 | rs35735496 |
| 20723675 | rs9689102 |
| 20723676 | rs10948991 |
| 20723676 | rs9269004 |
| 20723677 | rs13220607 |
| 20723677 | rs34700647 |
| 20723677 | rs9260898 |
| 20723678 | rs9260897 |
| 20723684 | rs28771394 |
| 20723686 | rs12213200 |
| 20723687 | rs9717987 |
| 20723688 | rs28771393 |
| 20723688 | rs9717716 |
| 20723689 | rs28771392 |
| 20723690 | rs11758009 |
| 20723690 | rs34159662 |
| 20723690 | rs34683172 |
| 20723690 | rs9717331 |
| 20723691 | rs9717853 |
| 20723692 | rs9765875 |
| 20723696 | rs12178974 |
| 20723696 | rs36003577 |
| 20723698 | rs9767747 |
| 20723700 | rs28771391 |
| 20723704 | rs13216352 |
| 20723707 | rs12200762 |
| 20723707 | rs12206373 |
| 20723707 | rs34570202 |
| 20723707 | rs36197940 |
| 20723707 | rs9265814 |
| 20723714 | rs34131282 |
| 20723717 | rs12175478 |
| 20723720 | rs28772692 |
| 20723722 | rs35516674 |
| 20723722 | rs35704013 |
| 20723727 | rs34691406 |
| 20723728 | rs28771390 |
| 20723728 | rs4374863 |
| 20723730 | rs34826149 |
| 20723734 | rs12207894 |
| 20723734 | rs12662476 |
| 20723736 | rs9260896 |
| 20723739 | rs28771389 |
| 20723740 | rs28771388 |
| 20723741 | rs9382592 |
| 20723745 | rs12173375 |
| 20723745 | rs9268072 |
| 20723745 | rs9382110 |
| 20723746 | rs4715211 |
| 20723747 | rs35961188 |
| 20723747 | rs34128950 |
| 20723747 | rs4620119 |
| 20723749 | rs9767236 |
| 20723752 | rs34717143 |
| 20723755 | rs13201202 |
| 20723756 | rs13201503 |
| 20723762 | rs13197088 |
| 20723762 | rs35347849 |
| 20723766 | rs35650828 |
| 20723766 | rs34663083 |
| 20723767 | rs13199241 |
| 20723767 | rs34205031 |
| 20723768 | rs34469031 |
| 20723768 | rs28749541 |
| 20723768 | rs9279137 |
| 20723769 | rs9260895 |
| 20723770 | rs35446958 |
| 20723770 | rs12212483 |
| 20723775 | rs28380829 |
| 20723777 | rs12525384 |
| 20723777 | rs34576984 |
| 20723782 | rs283541 |
| 20723785 | rs28380828 |
| 20723788 | rs10948698 |
| 20723790 | rs9265813 |
| 20723791 | rs9689173 |
| 20723792 | rs28380827 |
| 20723795 | rs35399169 |
| 20723799 | rs9260894 |
| 20723800 | rs12173388 |
| 20723800 | rs9269005 |
| 20723802 | rs28359816 |
| 20723803 | rs28380826 |
| 20723807 | rs280297 |
| 20723807 | rs34507582 |
| 20723807 | rs9261623 |
| 20723810 | rs12174621 |
| 20723813 | rs28380825 |
| 20723815 | rs35197377 |
| 20723816 | rs17362870 |
| 20723816 | rs35071522 |
| 20723816 | rs34562190 |
| 20723816 | rs35179751 |
| 20723816 | rs4458721 |
| 20723817 | rs12180385 |
| 20723817 | rs12206581 |
| 20723817 | rs12333308 |
| 20723817 | rs9269006 |
| 20723821 | rs9688475 |
| 20723829 | rs9269007 |
| 20723832 | rs9269008 |
| 20723832 | rs9269009 |
| 20723834 | rs35899754 |
| 20723836 | rs13211190 |
| 20723837 | rs12216274 |
| 20723838 | rs12191544 |
| 20723838 | rs4337934 |
| 20723841 | rs9279295 |
| 20723842 | rs12178577 |
| 20723849 | rs12215604 |
| 20723853 | rs9395360 |
| 20723854 | rs28749540 |
| 20723855 | rs28895226 |
| 20723855 | rs9260893 |
| 20723861 | rs4365925 |
| 20723864 | rs9261912 |
| 20723865 | rs28895227 |
| 20723870 | rs9261913 |
| 20723873 | rs12183502 |
| 20723873 | rs34332895 |
| 20723873 | rs9472692 |
| 20723876 | rs35640475 |
| 20723884 | rs9269010 |
| 20723888 | rs12192337 |
| 20723888 | rs35349786 |
| 20723891 | rs34978372 |
| 20723893 | rs280296 |
| 20723894 | rs11755576 |
| 20723903 | rs35553517 |
| 20723903 | rs28803616 |
| 20723904 | rs4358654 |
| 20723910 | rs9260892 |
| 20723914 | rs13196941 |
| 20723914 | rs9717238 |
| 20723915 | rs12175553 |
| 20723915 | rs12191408 |
| 20723915 | rs4460210 |
| 20723915 | rs9260891 |
| 20723918 | rs9395361 |
| 20723920 | rs9766917 |
| 20723926 | rs35073779 |
| 20723931 | rs9765884 |
| 20723931 | rs9767229 |
| 20723932 | rs35247846 |
| 20723932 | rs9717328 |
| 20723936 | rs28805674 |
| 20723936 | rs9260890 |
| 20723938 | rs34926348 |
| 20723938 | rs9717233 |
| 20723945 | rs35869128 |
| 20723946 | rs12175941 |
| 20723951 | rs9260889 |
| 20723952 | rs9766686 |
| 20723956 | rs10046203 |
| 20723957 | rs9260888 |
| 20723958 | rs12180540 |
| 20723961 | rs9766115 |
| 20723968 | rs6912019 |
| 20723969 | rs9767458 |
| 20723976 | rs13202161 |
| 20723989 | rs13218048 |
| 20724000 | rs13218040 |
| 20724001 | rs13206557 |
| 20724002 | rs13202152 |
| 20724013 | rs12210049 |
| 20724013 | rs34552032 |
| 20724018 | rs28890881 |
| 20724018 | rs34478537 |
| 20724025 | rs35191657 |
| 20724038 | rs34450517 |
| 20724043 | rs9689655 |
| 20724064 | rs12180172 |
| 20724068 | rs28865015 |
| 20724071 | rs9717839 |
| 20724072 | rs9717836 |
| 20724074 | rs9885593 |
| 20724082 | rs28887572 |
| 20724083 | rs13216113 |
| 20724083 | rs35254115 |
| 20724084 | rs10949190 |
| 20724085 | rs6923503 |
| 20724087 | rs12214411 |
| 20724091 | rs28747986 |
| 20724096 | rs1087363 |
| 20724096 | rs1091092 |
| 20724104 | rs12180759 |
| 20724107 | rs11758052 |
| 20724112 | rs9261321 |
| 20724113 | rs28861738 |
| 20724113 | rs36109104 |
| 20724123 | rs13208115 |
| 20724129 | rs9472693 |
| 20724130 | rs12208570 |
| 20724130 | rs28832660 |
| 20724131 | rs13200482 |
| 20724131 | rs9260886 |
| 20724131 | rs9472694 |
| 20724159 | rs9260885 |
| 20724172 | rs280295 |
| 20724172 | rs28749538 |
| 20724174 | rs13201041 |
| 20724184 | rs1087362 |
| 20724187 | rs12183850 |
| 20724190 | rs12202552 |
| 20724208 | rs9260884 |
| 20724210 | rs9474341 |
| 20724211 | rs9260883 |
| 20724222 | rs34669820 |
| 20724225 | rs12189886 |
| 20724234 | rs12182114 |
| 20724266 | rs9688643 |
| 20724272 | rs12195237 |
| 20724281 | rs35293595 |
| 20724281 | rs9381428 |
| 20724306 | rs34665644 |
| 20724309 | rs12189599 |
| 20724311 | rs12208503 |
| 20724312 | rs9800791 |
| 20724330 | rs12173681 |
| 20724337 | rs12182094 |
| 20724343 | rs12182119 |
| 20724352 | rs12182102 |
| 20724392 | rs12174506 |
| 20724393 | rs9767809 |
| 20724394 | rs12173703 |
| 20724401 | rs12202889 |
| 20724435 | rs28840538 |
| 20724466 | rs9473983 |
| 20724467 | rs34220946 |
| 20724487 | rs9261322 |
| 20724491 | rs9261323 |
| 20724517 | rs526092 |
| 20724564 | rs9473982 |
| 20724566 | rs34307764 |
| 20724626 | rs34490559 |
| 20724665 | rs4449621 |
| 20724685 | rs4714818 |
| 20724698 | rs4714817 |
| 20724722 | rs682384 |
| 20724738 | rs682051 |
| 20724753 | rs12530056 |
| 20724756 | rs35086683 |
| 20724888 | rs12528468 |
| 20725092 | rs10650195 |
| 20725092 | rs35956126 |
| 20725109 | rs6937578 |
| 20725159 | rs12530107 |
| 20725173 | rs720448 |
| 20725176 | rs9368212 |
| 20725250 | rs35481531 |
| 20725253 | rs720449 |
| 20725262 | rs10650196 |
| 20725495 | rs2064 |
| 20725499 | rs2065 |
| 20725638 | rs9368213 |
| 20725732 | rs41455744 |
| 20726077 | rs34960654 |
| 20726154 | rs6900954 |
| 20726168 | rs6456359 |
| 20726176 | rs7739405 |
| 20726601 | rs7760508 |
| 20726684 | rs10456007 |
| 20726987 | rs9460534 |
| 20727168 | rs11966749 |
| 20727353 | rs9358354 |
| 20727809 | rs9368214 |
| 20727982 | rs9350268 |
| 20728095 | rs2069013 |
| 20728160 | rs2069014 |
| 20728290 | rs2069015 |
| 20728292 | rs11967475 |
| 20729096 | rs10214549 |
| 20729217 | rs2223621 |
| 20729281 | rs9465835 |
| 20729984 | rs35404829 |
| 20729995 | rs10687080 |
| 20730233 | rs6915936 |
| 20730331 | rs9295472 |
| 20730732 | rs1569660 |
| 20730929 | rs7455009 |
| 20730945 | rs1569659 |
| 20730946 | rs5874775 |
| 20730948 | rs10601252 |
| 20730983 | rs1569658 |
| 20731030 | rs34142400 |
| 20731063 | rs16883996 |
| 20731181 | rs35073110 |
| 20731184 | rs5028948 |
| 20731263 | rs34201758 |
| 20731371 | rs6456360 |
| 20731373 | rs6456361 |
| 20731380 | rs6456362 |
| 20731584 | rs6922571 |
| 20731925 | rs35145358 |
| 20731950 | rs9465836 |
| 20732013 | rs7763304 |
| 20732158 | rs9465837 |
| 20732218 | rs7743314 |
| 20732337 | rs714831 |
| 20732361 | rs714830 |
| 20732484 | rs7743789 |
| 20732584 | rs5874776 |
| 20732589 | rs5874777 |
| 20732965 | rs16884003 |
| 20733079 | rs9356741 |
| 20733080 | rs9366358 |
| 20733246 | rs9356742 |
| 20733430 | rs11756987 |
| 20733470 | rs9465838 |
| 20733613 | rs2206579 |
| 20733920 | rs35111339 |
| 20734361 | rs6917583 |
| 20734388 | rs6917599 |
| 20734630 | rs13437429 |
| 20735418 | rs34307011 |
| 20735420 | rs4515379 |
| 20735756 | rs2223620 |
| 20735870 | rs9465839 |
| 20735993 | rs12664972 |
| 20736790 | rs28402356 |
| 20736798 | rs6934727 |
| 20736873 | rs35493429 |
| 20736881 | rs11369825 |
| 20737261 | rs4523079 |
| 20737470 | rs7771213 |
| 20737568 | rs9465840 |
| 20737687 | rs9465841 |
| 20737767 | rs9465842 |
| 20737837 | rs9460535 |
| 20737992 | rs34835908 |
| 20738060 | rs9465843 |
| 20738139 | rs13220465 |
| 20738159 | rs13220352 |
| 20738321 | rs4710937 |
| 20738375 | rs9460536 |
| 20738376 | rs13190734 |
| 20738451 | rs9465844 |
| 20738712 | rs35976895 |
| 20738713 | rs11327958 |
| 20738932 | rs13194407 |
| 20738990 | rs10484633 |
| 20739524 | rs2328528 |
| 20739789 | rs35958155 |
| 20739809 | rs4421185 |
| 20739932 | rs2328529 |
| 20740089 | rs9460537 |
| 20740745 | rs17224527 |
| 20740886 | rs34166991 |
| 20741024 | rs17823073 |
| 20741276 | rs12183074 |
| 20741316 | rs9465845 |
| 20741844 | rs35148963 |
| 20741886 | rs7768642 |
| 20742320 | rs9465846 |
| 20742407 | rs9465847 |
| 20742551 | rs17823127 |
| 20742594 | rs16884021 |
| 20742630 | rs4533976 |
| 20742865 | rs7755830 |
| 20743005 | rs7756031 |
| 20743139 | rs35650451 |
| 20743188 | rs10561117 |
| 20743241 | rs6940200 |
| 20743799 | rs9465848 |
| 20743808 | rs34351919 |
| 20745083 | rs4712519 |
| 20745285 | rs9368215 |
| 20745566 | rs12206285 |
| 20745853 | rs34049994 |
| 20745988 | rs7751957 |
| 20746702 | rs9465849 |
| 20746857 | rs7341291 |
| 20746957 | rs6921014 |
| 20747388 | rs9465850 |
| 20747583 | rs7758612 |
| 20747681 | rs35602526 |
| 20748295 | rs9465851 |
| 20748399 | rs34257578 |
| 20748403 | rs11339738 |
| 20748516 | rs9460538 |
| 20748850 | rs4712520 |
| 20748883 | rs4710938 |
| 20749084 | rs35889049 |
| 20749315 | rs9348440 |
| 20749879 | rs9465852 |
| 20750054 | rs12196009 |
| 20750306 | rs11968248 |
| 20750353 | rs34797179 |
| 20750764 | rs6925328 |
| 20750913 | rs36073053 |
| 20751140 | rs36224625 |
| 20751145 | rs35462488 |
| 20751150 | rs3060659 |
| 20751153 | rs5874778 |
| 20751155 | rs11267861 |
| 20751201 | rs4235999 |
| 20751230 | rs16884038 |
| 20751706 | rs2328530 |
| 20751731 | rs2328531 |
| 20751750 | rs28360636 |
| 20752162 | rs6932676 |
| 20752183 | rs9460539 |
| 20752303 | rs6932876 |
| 20752346 | rs34929755 |
| 20752359 | rs28733367 |
| 20752360 | rs11348111 |
| 20752473 | rs6933219 |
| 20752702 | rs6933165 |
| 20752872 | rs35255583 |
| 20752901 | rs34332316 |
| 20752923 | rs4710939 |
| 20753486 | rs11970417 |
| 20753659 | rs11963217 |
| 20753670 | rs11965473 |
| 20753833 | rs2876575 |
| 20754049 | rs7739974 |
| 20754976 | rs7745175 |
| 20755173 | rs7765784 |
| 20755178 | rs6907731 |
| 20755250 | rs35057896 |
| 20755313 | rs7746072 |
| 20755639 | rs10484632 |
| 20755770 | rs35444529 |
| 20755849 | rs17823571 |
| 20755941 | rs11965062 |
| 20755962 | rs6936199 |
| 20755965 | rs6913126 |
| 20756178 | rs6913509 |
| 20756613 | rs34638218 |
| 20756673 | rs35746011 |
| 20756741 | rs9460540 |
| 20757090 | rs36045545 |
| 20757129 | rs35392790 |
| 20757233 | rs6456364 |
| 20757260 | rs2179553 |
| 20757513 | rs9350269 |
| 20757531 | rs9465854 |
| 20757787 | rs2179552 |
| 20757936 | rs6925233 |
| 20758033 | rs2328532 |
| 20758248 | rs7743970 |
| 20758317 | rs13209457 |
| 20758318 | rs34641285 |
| 20758344 | rs13209538 |
| 20758387 | rs2876576 |
| 20758479 | rs13209572 |
| 20758653 | rs28783153 |
| 20758712 | rs9969037 |
| 20758800 | rs7766844 |
| 20758969 | rs7767133 |
| 20759291 | rs7749464 |
| 20760100 | rs2050225 |
| 20760696 | rs9295474 |
| 20760744 | rs9295475 |
| 20761529 | rs2328545 |
| 20761548 | rs28846771 |
| 20761779 | rs2876582 |
| 20761899 | rs10223446 |
| 20762094 | rs13219723 |
| 20762095 | rs13203489 |
| 20762154 | rs13203583 |
| 20762172 | rs13203887 |
| 20762279 | rs6456366 |
| 20762876 | rs9358355 |
| 20763089 | rs9368216 |
| 20763375 | rs9465855 |
| 20763384 | rs9465856 |
| 20763463 | rs16884070 |
| 20763482 | rs16884072 |
| 20763647 | rs13208604 |
| 20764169 | rs9465857 |
| 20764307 | rs9368217 |
| 20764559 | rs9460541 |
| 20764746 | rs9460542 |
| 20764765 | rs11969955 |
| 20764779 | rs4712522 |
| 20764924 | rs16884074 |
| 20765172 | rs34489684 |
| 20765324 | rs2328546 |
| 20765543 | rs4712523 |
| 20765844 | rs4712524 |
| 20765898 | rs35397753 |
| 20765991 | rs4710940 |
| 20766197 | rs13190727 |
| 20766215 | rs35136485 |
| 20766311 | rs35260725 |
| 20766335 | rs35939620 |
| 20766566 | rs17823996 |
| 20766713 | rs16884082 |
| 20767438 | rs6906327 |
| 20767566 | rs6456367 |
| 20767785 | rs6456368 |
| 20768202 | rs7749083 |
| 20768344 | rs6456369 |
| 20768669 | rs10946396 |
| 20768672 | rs10946397 |
| 20768710 | rs11759505 |
| 20769000 | rs13203361 |
| 20769013 | rs10946398 |
| 20769122 | rs7774594 |
| 20769229 | rs7754840 |
| 20769249 | rs9460543 |
| 20769508 | rs9460544 |
| 20769529 | rs9460545 |
| 20769711 | rs2206740 |
| 20769806 | rs5874779 |
| 20769807 | rs33970890 |
| 20769815 | rs5874780 |
| 20769816 | rs35014292 |
| 20769816 | rs35363501 |
| 20770092 | rs6456370 |
| 20770102 | rs979614 |
| 20770196 | rs35456723 |
| 20770571 | rs9368218 |
| 20770945 | rs4712525 |
| 20771014 | rs4712526 |
| 20771314 | rs4712527 |
| 20771442 | rs35191644 |
| 20771443 | rs34470647 |
| 20771611 | rs9460546 |
| 20771938 | rs9465859 |
| 20772079 | rs9465860 |
| 20772291 | rs736425 |
| 20772508 | rs3060776 |
| 20772509 | rs34941928 |
| 20772512 | rs5874781 |
| 20772761 | rs35778487 |
| 20773060 | rs742642 |
| 20773305 | rs35248697 |
| 20773436 | rs11967127 |
| 20773528 | rs7748382 |
| 20773547 | rs9688549 |
| 20773548 | rs9689351 |
| 20773570 | rs28665000 |
| 20773886 | rs7752236 |
| 20773925 | rs7772603 |
| 20774001 | rs7752780 |
| 20774034 | rs7752906 |
| 20774160 | rs34184260 |
| 20774223 | rs2206739 |
| 20774225 | rs2206738 |
| 20774250 | rs2206737 |
| 20774436 | rs11970425 |
| 20774484 | rs36034806 |
| 20774899 | rs35042364 |
| 20775218 | rs35540121 |
| 20775361 | rs9358356 |
| 20775667 | rs9356743 |
| 20775778 | rs9350270 |
| 20776366 | rs34929853 |
| 20778035 | rs34971765 |
| 20778443 | rs11970596 |
| 20779261 | rs12527373 |
| 20779367 | rs35916847 |
| 20780262 | rs11968224 |
| 20780271 | rs11968225 |
| 20780276 | rs9465861 |
| 20780296 | rs11968264 |
| 20780406 | rs12189849 |
| 20780413 | rs12209627 |
| 20780432 | rs12189895 |
| 20780855 | rs11968848 |
| 20781135 | rs11963945 |
| 20781601 | rs35677128 |
| 20781859 | rs7451008 |
| 20782670 | rs9368219 |
| 20782790 | rs1012636 |
| 20782945 | rs13217846 |
| 20783274 | rs1012635 |
| 20783700 | rs35665197 |
| 20783771 | rs35261542 |
| 20783828 | rs28823314 |
| 20783899 | rs28890810 |
| 20784051 | rs28871991 |
| 20784393 | rs34499031 |
| 20784650 | rs13208763 |
| 20784747 | rs28719685 |
| 20784789 | rs28856096 |
| 20785042 | rs11961863 |
| 20785211 | rs17824302 |
| 20785289 | rs12660618 |
| 20786302 | rs11371206 |
| 20786303 | rs34152621 |
| 20786409 | rs4712528 |
| 20786463 | rs13217082 |
| 20786470 | rs13217085 |
| 20786481 | rs13217090 |
| 20786483 | rs13217091 |
| 20786523 | rs13200946 |
| 20786772 | rs11968032 |
| 20786954 | rs9465863 |
| 20787289 | rs1569699 |
| 20787386 | rs34168173 |
| 20787688 | rs7756992 |
| 20788045 | rs35312717 |
| 20788657 | rs9348441 |
| 20788843 | rs9368220 |
| 20788941 | rs6931254 |
| 20789327 | rs6911742 |
| 20790601 | rs35612982 |
| 20791039 | rs35816514 |
| 20791123 | rs34612860 |
| 20791143 | rs9350271 |
| 20791162 | rs35657899 |
| 20791179 | rs11364854 |
| 20791249 | rs9460547 |
| 20791646 | rs16884103 |
| 20791961 | rs2206736 |
| 20793465 | rs9356744 |
| 20794295 | rs34987372 |
| 20794427 | rs36005020 |
| 20794552 | rs7766070 |
| 20794975 | rs9368222 |
| 20795290 | rs35566695 |
| 20795781 | rs10440832 |
| 20796100 | rs10440833 |
| 20796237 | rs35747076 |
| 20796578 | rs6900217 |
| 20797102 | rs34433496 |
| 20797924 | rs7748720 |
| 20797928 | rs34175709 |
| 20798290 | rs6911357 |
| 20800493 | rs12200791 |
| 20800955 | rs5874782 |
| 20800957 | rs36119385 |
| 20801341 | rs13219682 |
| 20802207 | rs4710941 |
| 20802270 | rs4620109 |
| 20802272 | rs28459626 |
| 20802273 | rs4712529 |
| 20802292 | rs10577753 |
| 20802504 | rs2223683 |
| 20802573 | rs2206735 |
| 20802863 | rs2206734 |
| 20802910 | rs34530846 |
| 20803458 | rs16884131 |
| 20804127 | rs10806921 |
| 20805104 | rs16884133 |
| 20805571 | rs17824500 |
| 20805652 | rs10946401 |
| 20806114 | rs16884135 |
| 20806582 | rs35711395 |
| 20807220 | rs11969783 |
| 20807364 | rs16884137 |
| 20808600 | rs11970626 |
| 20809092 | rs12190713 |
| 20809106 | rs11398905 |
| 20809415 | rs11961445 |
| 20809470 | rs35982077 |
| 20809486 | rs11305935 |
| 20810952 | rs9356745 |
| 20811700 | rs35043644 |
| 20811842 | rs16884140 |
| 20811931 | rs6931514 |
| 20812147 | rs35443650 |
| 20813281 | rs34671712 |
| 20813569 | rs11753081 |
| 20814081 | rs7739516 |
| 20814209 | rs6901559 |
| 20815176 | rs13196379 |
| 20815177 | rs13212234 |
| 20816204 | rs10536170 |
| 20817155 | rs9465869 |
| 20817688 | rs36070002 |
| 20818288 | rs17226450 |
| 20818905 | rs1073247 |
| 20819131 | rs9465870 |
| 20819386 | rs17226492 |
| 20819433 | rs13213613 |
| 20819567 | rs16884146 |
| 20819958 | rs2206733 |
| 20820440 | rs3749925 |
| 20821121 | rs9460548 |
| 20821619 | rs9460549 |
| 20821685 | rs1040558 |
| 20821893 | rs4712530 |
| 20822083 | rs35629277 |
| 20822362 | rs7451928 |
| 20822445 | rs6456371 |
| 20822589 | rs13220116 |
| 20822823 | rs2206732 |
| 20823169 | rs2179633 |
| 20823483 | rs11963770 |
| 20823805 | rs10946402 |
| 20823840 | rs4712531 |
| 20824098 | rs35738288 |
| 20824232 | rs9295478 |
| 20824549 | rs2328547 |
| 20824763 | rs3060781 |
| 20824764 | rs34686252 |
| 20824856 | rs13215905 |
| 20824884 | rs9368223 |
| 20824937 | rs2328548 |
| 20825025 | rs11427712 |
| 20825074 | rs6935599 |
| 20825100 | rs13216165 |
| 20825234 | rs9465871 |
| 20825383 | rs10946403 |
| 20826219 | rs2328549 |
| 20826449 | rs17226774 |
| 20827124 | rs9358357 |
| 20827211 | rs9368224 |
| 20827321 | rs11756271 |
| 20827372 | rs9358358 |
| 20827540 | rs9460550 |
| 20827858 | rs12110493 |
| 20827866 | rs12193125 |
| 20828258 | rs9356746 |
| 20828797 | rs9350272 |
| 20829322 | rs13219444 |
| 20829342 | rs12111216 |
| 20829562 | rs9350273 |
| 20829700 | rs9368225 |
| 20830399 | rs17825025 |
| 20831036 | rs9368226 |
| 20832213 | rs6903175 |
| 20832229 | rs6903744 |
| 20832537 | rs12111351 |
| 20832754 | rs4712536 |
| 20832986 | rs9356747 |
| 20833076 | rs9356748 |
| 20833219 | rs7767391 |
| 20833402 | rs7747752 |
| 20833511 | rs9350274 |
| 20833853 | rs34170041 |
| 20833919 | rs6915155 |
| 20834014 | rs6914868 |
| 20834472 | rs4538697 |
| 20835549 | rs4712537 |
| 20836048 | rs34097377 |
| 20836492 | rs6928012 |
| 20836710 | rs6908425 |
| 20837083 | rs28713236 |
| 20837085 | rs28570482 |
| 20837098 | rs35373857 |
| 20837704 | rs35980729 |
| 20838039 | rs9465872 |
| 20838780 | rs9942459 |
| 20838787 | rs9942429 |
| 20838794 | rs12197544 |
| 20839053 | rs34407999 |
| 20839503 | rs7741604 |
| 20840493 | rs35573456 |
| 20840651 | rs35633408 |
| 20841368 | rs9465873 |
| 20841433 | rs12211466 |
| 20842055 | rs4712538 |
| 20842055 | rs41413744 |
| 20842592 | rs13213979 |
| 20842973 | rs13217519 |
| 20843073 | rs34169067 |
| 20843074 | rs34773978 |
| 20843075 | rs34104100 |
| 20843076 | rs34790688 |
| 20843373 | rs11753021 |
| 20843473 | rs11753041 |
| 20843666 | rs6938978 |
| 20844017 | rs9295479 |
| 20844137 | rs10484631 |
| 20844216 | rs9358361 |
| 20844796 | rs9688471 |
| 20844922 | rs7744943 |
| 20844996 | rs9295480 |
| 20845006 | rs9368227 |
| 20845333 | rs9465874 |
| 20845619 | rs9358362 |
| 20845736 | rs9368228 |
| 20845737 | rs17839864 |
| 20845816 | rs34427164 |
| 20846388 | rs9368229 |
| 20846555 | rs9295481 |
| 20846750 | rs9368230 |
| 20846907 | rs9356750 |
| 20846992 | rs9366359 |
| 20847710 | rs41272361 |
| 20847886 | rs4710942 |
| 20847986 | rs9465875 |
| 20847998 | rs4710943 |
| 20848275 | rs9350276 |
| 20848458 | rs9465876 |
| 20848854 | rs34604097 |
| 20849362 | rs9688952 |
| 20849423 | rs34933309 |
| 20849720 | rs9350277 |
| 20850306 | rs13204257 |
| 20850665 | rs35106298 |
| 20851446 | rs13194434 |
| 20851931 | rs9358363 |
| 20852254 | rs34929383 |
| 20852706 | rs4710944 |
| 20852720 | rs12529627 |
| 20853053 | rs4710945 |
| 20853694 | rs9350278 |
| 20854215 | rs7738382 |
| 20854499 | rs1474739 |
| 20854568 | rs35432334 |
| 20854686 | rs16884185 |
| 20855689 | rs35345966 |
| 20856120 | rs2745928 |
| 20856124 | rs2745927 |
| 20856166 | rs2473649 |
| 20856236 | rs13215601 |
| 20856258 | rs35386836 |
| 20856392 | rs2819991 |
| 20856706 | rs2819995 |
| 20856744 | rs11752936 |
| 20856762 | rs1543364 |
| 20856765 | rs13203288 |
| 20856879 | rs2473648 |
| 20856966 | rs2473647 |
| 20856967 | rs2473646 |
| 20857002 | rs1543363 |
| 20857270 | rs16884190 |
| 20857656 | rs4644038 |
| 20858009 | rs2819988 |
| 20858162 | rs4475313 |
| 20858693 | rs2745933 |
| 20858865 | rs9460552 |
| 20859007 | rs9460553 |
| 20859031 | rs9350279 |
| 20859173 | rs10568019 |
| 20859187 | rs10598071 |
| 20859199 | rs12199271 |
| 20859220 | rs7765413 |
| 20859294 | rs7747724 |
| 20859674 | rs11756862 |
| 20859995 | rs4712539 |
| 20860175 | rs2819989 |
| 20860310 | rs2819990 |
| 20860358 | rs9465877 |
| 20860448 | rs34996587 |
| 20860459 | rs34744837 |
| 20861169 | rs2819992 |
| 20861420 | rs10946405 |
| 20861729 | rs2745932 |
| 20861866 | rs2819993 |
| 20861911 | rs9465879 |
| 20861915 | rs2819994 |
| 20861965 | rs34164249 |
| 20862098 | rs2493995 |
| 20862168 | rs35908672 |
| 20862169 | rs35525968 |
| 20862500 | rs9358364 |
| 20862605 | rs2745931 |
| 20862716 | rs2745930 |
| 20862740 | rs2745929 |
| 20863911 | rs2819996 |
| 20864423 | rs1012114 |
| 20864756 | rs2473651 |
| 20864955 | rs16901574 |
| 20865045 | rs9358365 |
| 20865049 | rs6913831 |
| 20865061 | rs10652206 |
| 20865064 | rs10652207 |
| 20865081 | rs11281792 |
| 20865121 | rs6934147 |
| 20865127 | rs13200804 |
| 20865134 | rs6934300 |
| 20865135 | rs2473650 |
| 20865136 | rs6913999 |
| 20865625 | rs9465880 |
| 20866301 | rs34767457 |
| 20866310 | rs35499882 |
| 20866326 | rs2819997 |
| 20866505 | rs2819998 |
| 20866612 | rs2819999 |
| 20866683 | rs2820000 |
| 20866739 | rs10946406 |
| 20866788 | rs34291318 |
| 20866813 | rs9465881 |
| 20866829 | rs9465882 |
| 20866922 | rs2820001 |
| 20867101 | rs2820002 |
| 20867254 | rs9350280 |
| 20867255 | rs9356751 |
| 20868156 | rs6909558 |
| 20868333 | rs11415727 |
| 20868591 | rs6910326 |
| 20869059 | rs12664021 |
| 20869213 | rs9295482 |
| 20869314 | rs9465883 |
| 20869658 | rs9465884 |
| 20870485 | rs4437452 |
| 20871061 | rs34235608 |
| 20871150 | rs4712540 |
| 20871244 | rs35450702 |
| 20872229 | rs4351239 |
| 20872296 | rs12190376 |
| 20872578 | rs4710946 |
| 20873095 | rs9465885 |
| 20873251 | rs12192328 |
| 20873365 | rs10536083 |
| 20873375 | rs36210777 |
| 20873677 | rs6149469 |
| 20874082 | rs4585542 |
| 20874261 | rs7751154 |
| 20874410 | rs9356752 |
| 20874676 | rs4510656 |
| 20875450 | rs7452218 |
| 20875680 | rs4320364 |
| 20876442 | rs9465886 |
| 20876454 | rs6926436 |
| 20877469 | rs34127549 |
| 20877508 | rs13214325 |
| 20877580 | rs7750031 |
| 20877596 | rs34801493 |
| 20877974 | rs7772390 |
| 20878762 | rs6900375 |
| 20879028 | rs4712541 |
| 20879194 | rs4710947 |
| 20879323 | rs34893361 |
| 20879617 | rs35938647 |
| 20879690 | rs9465887 |
| 20879842 | rs9368232 |
| 20879939 | rs9350281 |
| 20880120 | rs4132894 |
| 20880272 | rs12195490 |
| 20880344 | rs9465888 |
| 20880553 | rs6941727 |
| 20880797 | rs4712542 |
| 20880982 | rs6923622 |
| 20881085 | rs4712543 |
| 20881539 | rs9358366 |
| 20881700 | rs12211178 |
| 20881731 | rs7453352 |
| 20881858 | rs6929760 |
| 20881957 | rs6929918 |
| 20882292 | rs9465889 |
| 20882389 | rs4712545 |
| 20882575 | rs12193239 |
| 20882738 | rs9465890 |
| 20883200 | rs6936300 |
| 20883430 | rs6936840 |
| 20883639 | rs4493738 |
| 20883701 | rs11965197 |
| 20884250 | rs6899514 |
| 20884329 | rs6456372 |
| 20885570 | rs34358176 |
| 20886538 | rs9465891 |
| 20886687 | rs10946407 |
| 20887060 | rs35581397 |
| 20887457 | rs9358367 |
| 20887829 | rs4076137 |
| 20888220 | rs13207747 |
| 20888221 | rs13208059 |
| 20888329 | rs4074058 |
| 20888884 | rs9350282 |
| 20888894 | rs3193655 |
| 20888919 | rs11545101 |
| 20888919 | rs3193654 |
| 20889269 | rs12199265 |
| 20889428 | rs34113701 |
| 20889600 | rs41272363 |
| 20890872 | rs4478387 |
| 20891222 | rs11752139 |
| 20891373 | rs6910215 |
| 20891415 | rs10690190 |
| 20891417 | rs10647996 |
| 20891638 | rs10946408 |
| 20892162 | rs4710949 |
| 20892292 | rs4712547 |
| 20892371 | rs4712548 |
| 20892641 | rs10550462 |
| 20892642 | rs34372186 |
| 20893118 | rs9368234 |
| 20893144 | rs9348443 |
| 20893525 | rs5874783 |
| 20893543 | rs11344905 |
| 20893671 | rs12210335 |
| 20893673 | rs12210336 |
| 20893711 | rs6902757 |
| 20893943 | rs6456373 |
| 20894027 | rs6927892 |
| 20894054 | rs13210599 |
| 20894573 | rs34563996 |
| 20895285 | rs35066145 |
| 20897153 | rs10498698 |
| 20898456 | rs10806923 |
| 20898488 | rs10806924 |
| 20898554 | rs9368235 |
| 20898785 | rs9368236 |
| 20898787 | rs9368237 |
| 20899054 | rs9356753 |
| 20899265 | rs12111182 |
| 20899490 | rs11752772 |
| 20899516 | rs12661145 |
| 20899518 | rs12665631 |
| 20899691 | rs12208378 |
| 20900193 | rs34964322 |
| 20901075 | rs34430352 |
| 20901172 | rs4299818 |
| 20901416 | rs4495263 |
| 20901588 | rs7773697 |
| 20901981 | rs10684385 |
| 20901982 | rs33967126 |
| 20902035 | rs34171574 |
| 20902604 | rs9460557 |
| 20902661 | rs4492184 |
| 20902662 | rs35025612 |
| 20903233 | rs10946409 |
| 20903353 | rs9295483 |
| 20903427 | rs11751916 |
| 20904975 | rs36025037 |
| 20905571 | rs7738948 |
| 20905701 | rs9465892 |
| 20905830 | rs12211211 |
| 20906051 | rs11968853 |
| 20906198 | rs10456236 |
| 20906864 | rs4712549 |
| 20906867 | rs36194803 |
| 20906929 | rs4712550 |
| 20907200 | rs12213259 |
| 20907404 | rs4496779 |
| 20907564 | rs34432145 |
| 20907866 | rs9358368 |
| 20908149 | rs9368238 |
| 20908386 | rs4524599 |
| 20908448 | rs9465893 |
| 20908614 | rs12215519 |
| 20909486 | rs5874784 |
| 20909709 | rs34686362 |
| 20910367 | rs9460558 |
| 20910522 | rs12664231 |
| 20910525 | rs10946410 |
| 20911078 | rs4710950 |
| 20911442 | rs9465894 |
| 20911666 | rs6925153 |
| 20911791 | rs6456374 |
| 20912542 | rs9465895 |
| 20913109 | rs4712551 |
| 20913695 | rs4607421 |
| 20913962 | rs4293992 |
| 20913984 | rs9460559 |
| 20914140 | rs6942203 |
| 20914465 | rs12189708 |
| 20914479 | rs12660120 |
| 20914641 | rs9465897 |
| 20914675 | rs9465898 |
| 20915109 | rs6905567 |
| 20915183 | rs4580857 |
| 20915571 | rs12191782 |
| 20915711 | rs9358370 |
| 20916218 | rs7748911 |
| 20916690 | rs9350287 |
| 20916721 | rs9356754 |
| 20917615 | rs12525153 |
| 20917713 | rs6456375 |
| 20917744 | rs35117828 |
| 20917773 | rs9348444 |
| 20917833 | rs9465899 |
| 20917869 | rs6902880 |
| 20918009 | rs11756029 |
| 20918026 | rs9348445 |
| 20918173 | rs9358371 |
| 20918193 | rs9348446 |
| 20918577 | rs5874785 |
| 20918578 | rs35532605 |
| 20918604 | rs5874786 |
| 20918655 | rs5874787 |
| 20918710 | rs4373348 |
| 20918839 | rs11966932 |
| 20918888 | rs35887473 |
| 20918888 | rs34206478 |
| 20919070 | rs4330530 |
| 20919476 | rs13198015 |
| 20919599 | rs9465900 |
| 20919670 | rs9465901 |
| 20919827 | rs4710951 |
| 20919932 | rs4710952 |
| 20920567 | rs9358372 |
| 20920927 | rs9358373 |
| 20920992 | rs9368239 |
| 20921191 | rs12192912 |
| 20921354 | rs7747989 |
| 20921744 | rs7752140 |
| 20921896 | rs7752310 |
| 20922035 | rs4710953 |
| 20922189 | rs12662683 |
| 20922395 | rs9465902 |
| 20922954 | rs35040258 |
| 20922958 | rs4710954 |
| 20923239 | rs12661606 |
| 20923432 | rs10946411 |
| 20923828 | rs36037446 |
| 20924516 | rs12212105 |
| 20925219 | rs12213857 |
| 20925336 | rs12213956 |
| 20925602 | rs10946412 |
| 20925812 | rs11759888 |
| 20925967 | rs9366360 |
| 20926372 | rs12665734 |
| 20926457 | rs4712552 |
| 20926516 | rs9465903 |
| 20926518 | rs4712553 |
| 20927237 | rs12190831 |
| 20927408 | rs4334968 |
| 20927432 | rs34237934 |
| 20927804 | rs11961950 |
| 20927955 | rs10806925 |
| 20929468 | rs7753109 |
| 20929641 | rs9465904 |
| 20929820 | rs6931788 |
| 20929846 | rs11304808 |
| 20930110 | rs9465905 |
| 20930489 | rs9465906 |
| 20930866 | rs9465907 |
| 20931188 | rs9465908 |
| 20931485 | rs6938757 |
| 20931735 | rs6923264 |
| 20931827 | rs6900509 |
| 20932202 | rs9460561 |
| 20932400 | rs10946413 |
| 20932413 | rs9465909 |
| 20932808 | rs9460562 |
| 20932809 | rs9465910 |
| 20932976 | rs10806926 |
| 20932997 | rs9460563 |
| 20933029 | rs9465911 |
| 20933338 | rs11404073 |
| 20933339 | rs34199366 |
| 20933375 | rs4712554 |
| 20933483 | rs4712555 |
| 20933542 | rs35893096 |
| 20933749 | rs34260649 |
| 20933990 | rs9465912 |
| 20934012 | rs9368240 |
| 20934024 | rs9368241 |
| 20934147 | rs9368242 |
| 20934260 | rs4395717 |
| 20934729 | rs12209113 |
| 20935051 | rs4446563 |
| 20935807 | rs9348447 |
| 20936313 | rs10806927 |
| 20936483 | rs35622501 |
| 20936512 | rs12211426 |
| 20936992 | rs9368243 |
| 20937713 | rs7768091 |
| 20937751 | rs9356755 |
| 20938085 | rs6917412 |
| 20938283 | rs12215186 |
| 20938644 | rs9348448 |
| 20938681 | rs10570889 |
| 20938807 | rs34799469 |
| 20938927 | rs12190001 |
| 20938932 | rs9465913 |
| 20939133 | rs35997536 |
| 20939251 | rs6901110 |
| 20939636 | rs35810189 |
| 20940144 | rs9368244 |
| 20940807 | rs9350288 |
| 20940851 | rs12210496 |
| 20941839 | rs4568440 |
| 20942876 | rs11964964 |
| 20943072 | rs28616599 |
| 20943192 | rs12201027 |
| 20943239 | rs12194825 |
| 20943369 | rs34826961 |
| 20943724 | rs5874788 |
| 20943727 | rs34317828 |
| 20944192 | rs9465914 |
| 20944328 | rs9465915 |
| 20946192 | rs10592623 |
| 20946236 | rs7749282 |
| 20946253 | rs7769205 |
| 20946255 | rs7749021 |
| 20946263 | rs7769209 |
| 20946275 | rs7749034 |
| 20946424 | rs9295484 |
| 20946948 | rs6456377 |
| 20947467 | rs34883184 |
| 20948065 | rs9465917 |
| 20948650 | rs12210803 |
| 20948719 | rs4345385 |
| 20949055 | rs7764980 |
| 20949271 | rs7765060 |
| 20949459 | rs11967047 |
| 20949540 | rs35943413 |
| 20949572 | rs11967068 |
| 20949779 | rs9460564 |
| 20950591 | rs9465919 |
| 20950992 | rs35578988 |
| 20951013 | rs35344109 |
| 20952130 | rs9356756 |
| 20952309 | rs34656248 |
| 20952720 | rs17234378 |
| 20952897 | rs35541206 |
| 20952909 | rs9366361 |
| 20952918 | rs35392381 |
| 20953053 | rs7751431 |
| 20953657 | rs4336435 |
| 20953903 | rs36065886 |
| 20954005 | rs6920045 |
| 20954509 | rs6941354 |
| 20954569 | rs6941809 |
| 20954582 | rs6941508 |
| 20954975 | rs6903445 |
| 20955367 | rs7742468 |
| 20956366 | rs11417705 |
| 20956496 | rs11281215 |
| 20956497 | rs28533427 |
| 20956497 | rs9295485 |
| 20956498 | rs28588709 |
| 20956498 | rs34068549 |
| 20956738 | rs34367682 |
| 20957391 | rs7753271 |
| 20957513 | rs9460566 |
| 20957564 | rs34204682 |
| 20957693 | rs11962974 |
| 20957793 | rs35879846 |
| 20957849 | rs6921177 |
| 20958215 | rs6456378 |
| 20958359 | rs12663147 |
| 20958432 | rs13192874 |
| 20958637 | rs11294607 |
| 20958873 | rs7763216 |
| 20959240 | rs5874789 |
| 20959954 | rs11966086 |
| 20960487 | rs13208940 |
| 20960793 | rs4397214 |
| 20961601 | rs6908918 |
| 20961601 | rs34610909 |
| 20961612 | rs6908922 |
| 20961613 | rs6908779 |
| 20962352 | rs7771981 |
| 20962545 | rs9465921 |
| 20962984 | rs4236002 |
| 20963120 | rs4236003 |
| 20963450 | rs9350289 |
| 20963535 | rs9350290 |
| 20963662 | rs10558810 |
| 20963671 | rs10608340 |
| 20963756 | rs7761330 |
| 20963966 | rs13209243 |
| 20964017 | rs35463313 |
| 20964570 | rs12211628 |
| 20964682 | rs4712556 |
| 20965069 | rs4710955 |
| 20965780 | rs34481273 |
| 20965904 | rs16884229 |
| 20966215 | rs11965417 |
| 20966239 | rs4712558 |
| 20966335 | rs4712559 |
| 20966543 | rs34865786 |
| 20966637 | rs17826361 |
| 20966708 | rs9366362 |
| 20966831 | rs9366363 |
| 20967583 | rs11966194 |
| 20968463 | rs12524318 |
| 20968532 | rs28412953 |
| 20968698 | rs9358374 |
| 20968821 | rs9350291 |
| 20968927 | rs9350292 |
| 20969034 | rs9350293 |
| 20969131 | rs16901585 |
| 20969205 | rs5007237 |
| 20969579 | rs4383807 |
| 20969839 | rs4330531 |
| 20970113 | rs12662176 |
| 20970590 | rs9356757 |
| 20970850 | rs34873202 |
| 20970884 | rs9368245 |
| 20970889 | rs34101377 |
| 20971175 | rs12201353 |
| 20971267 | rs12214755 |
| 20972435 | rs11269210 |
| 20973576 | rs9465922 |
| 20973608 | rs12191898 |
| 20973841 | rs35647500 |
| 20973851 | rs5874790 |
| 20973852 | rs35372258 |
| 20974027 | rs7749397 |
| 20974223 | rs7454011 |
| 20974715 | rs35244703 |
| 20974836 | rs9368246 |
| 20974986 | rs34062103 |
| 20975000 | rs35487666 |
| 20975596 | rs16884250 |
| 20975795 | rs10554344 |
| 20976043 | rs4370355 |
| 20976276 | rs10588127 |
| 20976276 | rs34382383 |
| 20977459 | rs7766346 |
| 20977678 | rs7766681 |
| 20977795 | rs7770607 |
| 20978072 | rs9350294 |
| 20978617 | rs9350295 |
| 20978719 | rs9366364 |
| 20978768 | rs34447575 |
| 20978882 | rs9366365 |
| 20980033 | rs35505816 |
| 20980715 | rs34113324 |
| 20981367 | rs10946414 |
| 20981827 | rs4645410 |
| 20982392 | rs16884254 |
| 20982541 | rs13197235 |
| 20983561 | rs9350296 |
| 20983706 | rs9368247 |
| 20984381 | rs12665789 |
| 20984489 | rs4077403 |
| 20984592 | rs4077404 |
| 20984662 | rs4077405 |
| 20984894 | rs4529295 |
| 20984917 | rs35499986 |
| 20985132 | rs4618519 |
| 20985379 | rs36002274 |
| 20985482 | rs9368248 |
| 20985514 | rs7742802 |
| 20985952 | rs4236004 |
| 20986261 | rs4712561 |
| 20986658 | rs9358375 |
| 20986864 | rs12194583 |
| 20986999 | rs34923632 |
| 20987073 | rs4537128 |
| 20987237 | rs4626408 |
| 20987282 | rs12194813 |
| 20987312 | rs6915746 |
| 20988259 | rs9350297 |
| 20988570 | rs12210231 |
| 20988821 | rs12198243 |
| 20989365 | rs10946415 |
| 20989383 | rs7763704 |
| 20989596 | rs10589878 |
| 20990154 | rs9465923 |
| 20990216 | rs9465924 |
| 20990238 | rs9460567 |
| 20990523 | rs9465925 |
| 20990820 | rs4612156 |
| 20991595 | rs10946416 |
| 20992059 | rs4546483 |
| 20992198 | rs9460569 |
| 20993260 | rs35314952 |
| 20993493 | rs4131667 |
| 20993700 | rs4334975 |
| 20993732 | rs4272215 |
| 20994113 | rs11756312 |
| 20994209 | rs6926335 |
| 20995305 | rs9366367 |
| 20995933 | rs6938256 |
| 20996432 | rs6938755 |
| 20996580 | rs9465928 |
| 20996674 | rs7773564 |
| 20996730 | rs28843472 |
| 20996731 | rs12210522 |
| 20996732 | rs13191608 |
| 20996755 | rs10806929 |
| 20996858 | rs9268994 |
| 20996859 | rs9268995 |
| 20996890 | rs28895225 |
| 20996905 | rs9268996 |
| 20996911 | rs9268997 |
| 20996937 | rs35328517 |
| 20996973 | rs9268998 |
| 20997216 | rs12055384 |
| 20997384 | rs12055630 |
| 20997540 | rs4947247 |
| 20998096 | rs9460571 |
| 20998693 | rs10946417 |
| 20998950 | rs11752477 |
| 20999169 | rs6913323 |
| 20999294 | rs12194053 |
| 20999407 | rs36009649 |
| 20999752 | rs10594050 |
| 20999763 | rs5874791 |
| 20999764 | rs35553046 |
| 20999770 | rs4363020 |
| 21000241 | rs10456008 |
| 21000447 | rs35294796 |
| 21000702 | rs9368251 |
| 21001068 | rs6916036 |
| 21001199 | rs34587331 |
| 21001226 | rs6456379 |
| 21001338 | rs9368252 |
| 21001683 | rs4626415 |
| 21002414 | rs5874792 |
| 21002415 | rs33925173 |
| 21002601 | rs5874793 |
| 21002602 | rs34720816 |
| 21002625 | rs12528945 |
| 21004281 | rs12206985 |
| 21004330 | rs11757050 |
| 21004330 | rs34449480 |
| 21004372 | rs9368253 |
| 21004532 | rs9295486 |
| 21004540 | rs9465930 |
| 21004836 | rs12208719 |
| 21005635 | rs6918643 |
| 21005875 | rs4712562 |
| 21006091 | rs6456380 |
| 21006119 | rs7759877 |
| 21006228 | rs9358376 |
| 21006412 | rs35620702 |
| 21006800 | rs28665148 |
| 21006801 | rs28599540 |
| 21007273 | rs35400949 |
| 21007751 | rs12153898 |
| 21007819 | rs12154181 |
| 21007863 | rs12154184 |
| 21008099 | rs9368254 |
| 21008207 | rs9368255 |
| 21009058 | rs35958016 |
| 21009211 | rs6456381 |
| 21009246 | rs7758467 |
| 21009290 | rs6456382 |
| 21009421 | rs12153811 |
| 21009654 | rs7739013 |
| 21009711 | rs6922768 |
| 21009716 | rs13191241 |
| 21009909 | rs10640864 |
| 21009910 | rs34135721 |
| 21010295 | rs34154507 |
| 21010566 | rs35386545 |
| 21010568 | rs9368256 |
| 21010964 | rs7740094 |
| 21010972 | rs7758155 |
| 21011220 | rs9366368 |
| 21011950 | rs9358377 |
| 21012344 | rs6908429 |
| 21012629 | rs4712563 |
| 21012910 | rs4710957 |
| 21013210 | rs12214079 |
| 21013433 | rs9460572 |
| 21013812 | rs2876583 |
| 21013840 | rs9465931 |
| 21014102 | rs34068097 |
| 21014657 | rs10080699 |
| 21014657 | rs9460573 |
| 21014665 | rs9460574 |
| 21014666 | rs6920918 |
| 21015860 | rs4413596 |
| 21016247 | rs6909682 |
| 21016278 | rs6910032 |
| 21016580 | rs1498427 |
| 21016869 | rs34713988 |
| 21017395 | rs9368257 |
| 21017439 | rs6939006 |
| 21017512 | rs17236121 |
| 21017740 | rs11753331 |
| 21018757 | rs12198263 |
| 21018818 | rs35916632 |
| 21018915 | rs9350298 |
| 21018982 | rs4710958 |
| 21019053 | rs35886192 |
| 21019304 | rs6456385 |
| 21019380 | rs7763674 |
| 21019654 | rs7746308 |
| 21020651 | rs12190631 |
| 21020765 | rs1498425 |
| 21021671 | rs13197106 |
| 21022074 | rs6913538 |
| 21022178 | rs9460575 |
| 21022308 | rs6914232 |
| 21022483 | rs9460576 |
| 21022485 | rs6914586 |
| 21022873 | rs9465932 |
| 21022913 | rs2030082 |
| 21022932 | rs9350299 |
| 21023379 | rs10536841 |
| 21023692 | rs9465933 |
| 21024540 | rs34537557 |
| 21025636 | rs9368258 |
| 21026230 | rs6938184 |
| 21026422 | rs6938415 |
| 21026611 | rs35678799 |
| 21028069 | rs28440883 |
| 21028102 | rs4712564 |
| 21028251 | rs4712565 |
| 21028711 | rs9366369 |
| 21028958 | rs9465934 |
| 21029390 | rs6913658 |
| 21030247 | rs7765765 |
| 21030707 | rs12662218 |
| 21030842 | rs9460577 |
| 21030852 | rs4712566 |
| 21030926 | rs4712567 |
| 21030962 | rs6936002 |
| 21031254 | rs9460578 |
| 21031561 | rs7771782 |
| 21032098 | rs2328550 |
| 21032169 | rs9465935 |
| 21033024 | rs9460579 |
| 21033247 | rs2328551 |
| 21033384 | rs34787947 |
| 21033907 | rs35164658 |
| 21034157 | rs34463604 |
| 21034296 | rs16884302 |
| 21034654 | rs13215945 |
| 21034664 | rs13215949 |
| 21034748 | rs13202822 |
| 21034750 | rs13203127 |
| 21034760 | rs13203130 |
| 21035097 | rs35259543 |
| 21035108 | rs10687937 |
| 21035135 | rs9358378 |
| 21035148 | rs9465936 |
| 21035989 | rs6903176 |
| 21036896 | rs34272344 |
| 21037020 | rs9366370 |
| 21037483 | rs7747830 |
| 21037954 | rs35552655 |
| 21038014 | rs11970010 |
| 21038092 | rs11970030 |
| 21038468 | rs35341341 |
| 21038480 | rs5874794 |
| 21038957 | rs34094116 |
| 21039069 | rs9366371 |
| 21039135 | rs7775995 |
| 21040473 | rs6916666 |
| 21041656 | rs16884308 |
| 21042140 | rs11395158 |
| 21042539 | rs34100038 |
| 21042991 | rs7768647 |
| 21043110 | rs35030815 |
| 21043259 | rs9350300 |
| 21044027 | rs10946419 |
| 21044393 | rs10946420 |
| 21044437 | rs9465937 |
| 21044451 | rs9368259 |
| 21044452 | rs33911838 |
| 21044591 | rs9358379 |
| 21044671 | rs9460580 |
| 21044802 | rs35523552 |
| 21044952 | rs16884310 |
| 21046071 | rs34741537 |
| 21046084 | rs12526287 |
| 21046565 | rs9465938 |
| 21046566 | rs28734969 |
| 21046585 | rs7747773 |
| 21046841 | rs9465939 |
| 21046900 | rs4144650 |
| 21047359 | rs4712569 |
| 21047690 | rs4712570 |
| 21047713 | rs6939250 |
| 21047725 | rs4710959 |
| 21047769 | rs4710960 |
| 21047987 | rs13191844 |
| 21048358 | rs12196595 |
| 21048740 | rs9350301 |
| 21049043 | rs9350302 |
| 21049105 | rs11964084 |
| 21049192 | rs6927419 |
| 21049306 | rs12198512 |
| 21049369 | rs11450413 |
| 21049370 | rs11409601 |
| 21049371 | rs33942714 |
| 21050175 | rs4307160 |
| 21050624 | rs4712571 |
| 21051211 | rs9465941 |
| 21051466 | rs10946423 |
| 21051483 | rs9465942 |
| 21051538 | rs34759060 |
| 21051555 | rs9295487 |
| 21051560 | rs5874795 |
| 21051561 | rs9358380 |
| 21051563 | rs12174149 |
| 21051568 | rs9350303 |
| 21051569 | rs9358381 |
| 21052585 | rs11279071 |
| 21052648 | rs9465943 |
| 21053046 | rs9465944 |
| 21053295 | rs10690950 |
| 21053629 | rs34879403 |
| 21053757 | rs7772447 |
| 21053935 | rs7773189 |
| 21054476 | rs34602677 |
| 21054784 | rs6901153 |
| 21054804 | rs11361870 |
| 21054805 | rs35132815 |
| 21055236 | rs12203876 |
| 21055710 | rs35896536 |
| 21055853 | rs34881630 |
| 21055870 | rs9368260 |
| 21056065 | rs9460581 |
| 21056280 | rs6930879 |
| 21056288 | rs6930887 |
| 21056329 | rs6931047 |
| 21056472 | rs9350305 |
| 21058200 | rs9350306 |
| 21058970 | rs12197923 |
| 21059112 | rs9460582 |
| 21059179 | rs5874796 |
| 21059866 | rs6922187 |
| 21060142 | rs9465945 |
| 21060180 | rs10558500 |
| 21060186 | rs11289942 |
| 21060212 | rs9348451 |
| 21060247 | rs6922914 |
| 21060361 | rs9358382 |
| 21060639 | rs35863080 |
| 21061204 | rs4631270 |
| 21061590 | rs2015426 |
| 21061898 | rs7749498 |
| 21062676 | rs9350307 |
| 21062805 | rs1004172 |
| 21063311 | rs7775523 |
| 21064970 | rs12199174 |
| 21066160 | rs9368261 |
| 21067118 | rs7738201 |
| 21067314 | rs17236645 |
| 21067986 | rs16884319 |
| 21068463 | rs9918311 |
| 21068617 | rs34769285 |
| 21068702 | rs12205321 |
| 21068911 | rs6456388 |
| 21069040 | rs4712572 |
| 21069650 | rs12524678 |
| 21069850 | rs13211056 |
| 21070260 | rs17236694 |
| 21070934 | rs35382761 |
| 21071276 | rs28612346 |
| 21071587 | rs6915209 |
| 21071832 | rs35420176 |
| 21072294 | rs6940952 |
| 21072419 | rs35708433 |
| 21072662 | rs6941808 |
| 21072828 | rs11966306 |
| 21073181 | rs16884325 |
| 21073468 | rs7743030 |
| 21073553 | rs28429494 |
| 21074417 | rs4712573 |
| 21074865 | rs11752712 |
| 21075695 | rs9460583 |
| 21075964 | rs9460584 |
| 21076612 | rs34425275 |
| 21076615 | rs1112255 |
| 21076815 | rs1112256 |
| 21077529 | rs9348452 |
| 21077563 | rs34660637 |
| 21077716 | rs7746754 |
| 21077794 | rs9350308 |
| 21078333 | rs34215872 |
| 21079005 | rs2030081 |
| 21079247 | rs6940649 |
| 21079554 | rs6941043 |
| 21079964 | rs6913817 |
| 21080948 | rs201361 |
| 21081289 | rs34479545 |
| 21081631 | rs1980458 |
| 21082363 | rs13210151 |
| 21082946 | rs34266759 |
| 21083025 | rs34192233 |
| 21083039 | rs11427521 |
| 21083189 | rs35882882 |
| 21083211 | rs11330322 |
| 21083279 | rs1997685 |
| 21083363 | rs10498699 |
| 21083433 | rs201360 |
| 21085426 | rs201359 |
| 21085653 | rs201358 |
| 21085834 | rs34764914 |
| 21087560 | rs201357 |
| 21088272 | rs4712575 |
| 21088448 | rs4712576 |
| 21088450 | rs4712577 |
| 21088472 | rs365001 |
| 21088891 | rs35829025 |
| 21089414 | rs383684 |
| 21089616 | rs444005 |
| 21090258 | rs35693086 |
| 21090584 | rs11961135 |
| 21091067 | rs201356 |
| 21091773 | rs201355 |
| 21091799 | rs12193382 |
| 21091799 | rs34391804 |
| 21091914 | rs35723307 |
| 21091926 | rs35448639 |
| 21093023 | rs35957348 |
| 21093317 | rs201354 |
| 21093369 | rs201353 |
| 21093439 | rs9350309 |
| 21093650 | rs201352 |
| 21094109 | rs201351 |
| 21094143 | rs35853352 |
| 21094861 | rs5874797 |
| 21094872 | rs5874798 |
| 21094931 | rs201350 |
| 21095014 | rs1997684 |
| 21095425 | rs4560627 |
| 21095482 | rs10699637 |
| 21095654 | rs7453577 |
| 21096171 | rs11300877 |
| 21096223 | rs201349 |
| 21096419 | rs10694429 |
| 21096428 | rs3223730 |
| 21096922 | rs201348 |
| 21097026 | rs35010661 |
| 21097035 | rs201347 |
| 21097047 | rs10701919 |
| 21097265 | rs201346 |
| 21098132 | rs6456389 |
| 21099063 | rs12528036 |
| 21099645 | rs201345 |
| 21099698 | rs13199754 |
| 21099916 | rs35504365 |
| 21100226 | rs35586782 |
| 21100247 | rs28418444 |
| 21100248 | rs13196975 |
| 21100263 | rs35586503 |
| 21100320 | rs9356759 |
| 21100418 | rs9366372 |
| 21100871 | rs10946424 |
| 21100949 | rs201344 |
| 21101200 | rs11964880 |
| 21101281 | rs11967584 |
| 21101513 | rs201343 |
| 21102229 | rs201342 |
| 21102283 | rs9350310 |
| 21102377 | rs9368262 |
| 21102486 | rs9368263 |
| 21103236 | rs35996844 |
| 21103858 | rs201341 |
| 21103935 | rs12660707 |
| 21104054 | rs201340 |
| 21104291 | rs201339 |
| 21105034 | rs396308 |
| 21105044 | rs4712578 |
| 21105348 | rs449233 |
| 21107366 | rs9358383 |
| 21107874 | rs36078234 |
| 21108856 | rs9368264 |
| 21109330 | rs9368265 |
| 21109358 | rs9368266 |
| 21109523 | rs9368267 |
| 21109553 | rs6940871 |
| 21109878 | rs35240009 |
| 21110331 | rs6914677 |
| 21110432 | rs9350311 |
| 21110750 | rs12195827 |
| 21110788 | rs9366373 |
| 21110864 | rs34620040 |
| 21111239 | rs9350312 |
| 21111513 | rs2038066 |
| 21111536 | rs13191651 |
| 21111581 | rs13191676 |
| 21111601 | rs2038065 |
| 21112269 | rs7744303 |
| 21112288 | rs7744317 |
| 21112352 | rs7762669 |
| 21113187 | rs6932336 |
| 21113252 | rs34002111 |
| 21113325 | rs6932393 |
| 21113687 | rs2839854 |
| 21114641 | rs9348453 |
| 21115599 | rs9358384 |
| 21115719 | rs9348454 |
| 21115720 | rs2473089 |
| 21115866 | rs2494728 |
| 21116011 | rs9358385 |
| 21116132 | rs1498426 |
| 21116718 | rs12192642 |
| 21116822 | rs13200036 |
| 21116851 | rs9368268 |
| 21116920 | rs7750463 |
| 21116972 | rs7750903 |
| 21117087 | rs374654 |
| 21117572 | rs6914615 |
| 21117867 | rs9465946 |
| 21118124 | rs364334 |
| 21118132 | rs416688 |
| 21118300 | rs11382802 |
| 21118547 | rs1548145 |
| 21118567 | rs201291 |
| 21119018 | rs9465947 |
| 21119021 | rs12197742 |
| 21119236 | rs201292 |
| 21119698 | rs35998561 |
| 21119973 | rs201293 |
| 21120225 | rs9358386 |
| 21120735 | rs35254358 |
| 21120883 | rs6905258 |
| 21121364 | rs201294 |
| 21121603 | rs201295 |
| 21121962 | rs7748932 |
| 21121994 | rs2494729 |
| 21122535 | rs3966676 |
| 21122822 | rs34834774 |
| 21122975 | rs16884376 |
| 21123408 | rs201308 |
| 21123602 | rs8180606 |
| 21123934 | rs201309 |
| 21123964 | rs201310 |
| 21124001 | rs6456390 |
| 21124511 | rs201311 |
| 21124822 | rs5874799 |
| 21124823 | rs34733906 |
| 21124830 | rs400514 |
| 21124882 | rs3061573 |
| 21125298 | rs16884385 |
| 21125848 | rs34894804 |
| 21125898 | rs9460586 |
| 21126295 | rs16884389 |
| 21126495 | rs35678732 |
| 21126634 | rs10946425 |
| 21127516 | rs6899729 |
| 21127744 | rs16884394 |
| 21128114 | rs36115181 |
| 21128124 | rs5874800 |
| 21128307 | rs34639729 |
| 21128419 | rs35260082 |
| 21128533 | rs7744010 |
| 21128746 | rs201290 |
| 21129343 | rs201289 |
| 21129647 | rs34802324 |
| 21129981 | rs201288 |
| 21130208 | rs201287 |
| 21131340 | rs34891710 |
| 21131348 | rs11438527 |
| 21131431 | rs34878496 |
| 21131727 | rs16884396 |
| 21132081 | rs9465948 |
| 21132220 | rs16884399 |
| 21133062 | rs11297091 |
| 21133400 | rs169293 |
| 21133737 | rs201307 |
| 21133815 | rs12206158 |
| 21133964 | rs34317920 |
| 21134374 | rs34305502 |
| 21134401 | rs35570989 |
| 21135019 | rs13218003 |
| 21135740 | rs12209877 |
| 21136038 | rs6921781 |
| 21136172 | rs16884406 |
| 21136940 | rs201306 |
| 21136972 | rs201305 |
| 21137253 | rs201304 |
| 21137477 | rs34243092 |
| 21137698 | rs201303 |
| 21138072 | rs201302 |
| 21138132 | rs201301 |
| 21138504 | rs35592283 |
| 21138790 | rs10946426 |
| 21138980 | rs6919322 |
| 21139058 | rs4710961 |
| 21139068 | rs9465949 |
| 21139350 | rs398913 |
| 21139414 | rs4710962 |
| 21139480 | rs12526927 |
| 21139855 | rs9460587 |
| 21140661 | rs415446 |
| 21141104 | rs35761643 |
| 21141617 | rs11961096 |
| 21141944 | rs201300 |
| 21142185 | rs35161624 |
| 21142199 | rs35206549 |
| 21142635 | rs13210277 |
| 21142726 | rs12198160 |
| 21142744 | rs7766970 |
| 21143715 | rs201299 |
| 21143786 | rs35061829 |
| 21144118 | rs201298 |
| 21144658 | rs201297 |
| 21145049 | rs201296 |
| 21145549 | rs34771308 |
| 21145593 | rs9295488 |
| 21145919 | rs989969 |
| 21146291 | rs34874522 |
| 21146814 | rs201312 |
| 21146901 | rs201313 |
| 21147026 | rs201314 |
| 21147263 | rs9350314 |
| 21147738 | rs6918555 |
| 21147791 | rs6918751 |
| 21147930 | rs9295489 |
| 21148244 | rs13190826 |
| 21148269 | rs13190835 |
| 21148356 | rs17662372 |
| 21148684 | rs201315 |
| 21148701 | rs16884415 |
| 21150019 | rs16884420 |
| 21150116 | rs17730046 |
| 21150139 | rs201316 |
| 21151059 | rs16884425 |
| 21151118 | rs1555052 |
| 21151344 | rs11753092 |
| 21151557 | rs34254730 |
| 21151557 | rs9465950 |
| 21151573 | rs7756338 |
| 21151831 | rs9348455 |
| 21151949 | rs201317 |
| 21152589 | rs6925617 |
| 21152677 | rs201318 |
| 21152873 | rs9460588 |
| 21152874 | rs34536386 |
| 21152874 | rs9460589 |
| 21152898 | rs201319 |
| 21153050 | rs201320 |
| 21153105 | rs201321 |
| 21153294 | rs201322 |
| 21153342 | rs201323 |
| 21153387 | rs201324 |
| 21153587 | rs201325 |
| 21153907 | rs9460590 |
| 21153987 | rs201326 |
| 21154014 | rs201327 |
| 21154069 | rs201328 |
| 21154147 | rs201329 |
| 21154297 | rs201330 |
| 21154380 | rs13217562 |
| 21154919 | rs34472513 |
| 21154958 | rs201331 |
| 21155233 | rs201332 |
| 21155256 | rs34312444 |
| 21155363 | rs201333 |
| 21155639 | rs201334 |
| 21155793 | rs201335 |
| 21156103 | rs201336 |
| 21156840 | rs201337 |
| 21156885 | rs201338 |
| 21157007 | rs34847494 |
| 21157597 | rs9942509 |
| 21157604 | rs34987941 |
| 21158291 | rs10806930 |
| 21158841 | rs4712579 |
| 21160395 | rs7775602 |
| 21160650 | rs11760181 |
| 21160654 | rs2056951 |
| 21160683 | rs7758243 |
| 21160934 | rs9358387 |
| 21160973 | rs6456391 |
| 21160974 | rs9465951 |
| 21161031 | rs6903997 |
| 21162291 | rs6933211 |
| 21162635 | rs7748652 |
| 21162661 | rs6456392 |
| 21162711 | rs13215037 |
| 21162805 | rs7752701 |
| 21163066 | rs6456393 |
| 21163111 | rs2328567 |
| 21163129 | rs6456394 |
| 21163541 | rs12661235 |
| 21163651 | rs7754018 |
| 21163696 | rs9350315 |
| 21163923 | rs9918435 |
| 21165424 | rs9465953 |
| 21165665 | rs35560899 |
| 21165892 | rs34142046 |
| 21166104 | rs9465954 |
| 21166730 | rs12202256 |
| 21166802 | rs2206014 |
| 21167015 | rs13219721 |
| 21167016 | rs13205176 |
| 21167182 | rs13219752 |
| 21167200 | rs13205420 |
| 21167401 | rs9350316 |
| 21167460 | rs9368270 |
| 21167796 | rs9465955 |
| 21169768 | rs28532482 |
| 21170022 | rs17237178 |
| 21170224 | rs13209905 |
| 21170225 | rs13209787 |
| 21170236 | rs13210005 |
| 21170269 | rs13210023 |
| 21170287 | rs13210027 |
| 21170376 | rs7744921 |
| 21170433 | rs9465956 |
| 21170545 | rs9465957 |
| 21170553 | rs9465958 |
| 21170579 | rs16884466 |
| 21170710 | rs11969047 |
| 21170765 | rs16884468 |
| 21170846 | rs11969587 |
| 21171228 | rs9465959 |
| 21171401 | rs34908981 |
| 21172309 | rs9460591 |
| 21173104 | rs35603774 |
| 21173126 | rs9465960 |
| 21173198 | rs34559907 |
| 21173393 | rs4710963 |
| 21173679 | rs9465961 |
| 21173766 | rs1001310 |
| 21173805 | rs4712580 |
| 21174689 | rs9460592 |
| 21174762 | rs9460593 |
| 21176267 | rs12209678 |
| 21177342 | rs35738724 |
| 21177501 | rs7762612 |
| 21177928 | rs36174378 |
| 21177981 | rs13199309 |
| 21178014 | rs9295490 |
| 21178237 | rs12660913 |
| 21178243 | rs10946427 |
| 21178328 | rs12199982 |
| 21178333 | rs34600664 |
| 21178468 | rs6932873 |
| 21178475 | rs9356760 |
| 21178487 | rs9465962 |
| 21178588 | rs9356761 |
| 21178609 | rs10650825 |
| 21179141 | rs4382241 |
| 21179575 | rs2013346 |
| 21179832 | rs10498700 |
| 21180396 | rs9350317 |
| 21180629 | rs11757139 |
| 21180733 | rs11757596 |
| 21181008 | rs11757677 |
| 21181027 | rs9465963 |
| 21181171 | rs13203959 |
| 21181269 | rs9366374 |
| 21181357 | rs11968037 |
| 21181410 | rs6918997 |
| 21181499 | rs9368271 |
| 21181567 | rs9460594 |
| 21181588 | rs9460595 |
| 21182172 | rs9295491 |
| 21182342 | rs4283868 |
| 21182548 | rs4413602 |
| 21183182 | rs10541645 |
| 21183338 | rs10541646 |
| 21183364 | rs11407560 |
| 21183365 | rs35953450 |
| 21183371 | rs7766554 |
| 21183409 | rs7766574 |
| 21183437 | rs10541647 |
| 21183457 | rs7766451 |
| 21183464 | rs7766713 |
| 21183493 | rs7766728 |
| 21183552 | rs4280955 |
| 21183645 | rs7767038 |
| 21183675 | rs7766788 |
| 21183741 | rs7770701 |
| 21184027 | rs16884481 |
| 21184246 | rs9295492 |
| 21184599 | rs4367364 |
| 21184749 | rs2068072 |
| 21184770 | rs2068071 |
| 21185523 | rs11963640 |
| 21185602 | rs11961090 |
| 21185611 | rs11963654 |
| 21185810 | rs35119417 |
| 21186212 | rs9358388 |
| 21186666 | rs4599624 |
| 21187063 | rs10080639 |
| 21187282 | rs7749838 |
| 21187336 | rs11967298 |
| 21187386 | rs34700985 |
| 21187552 | rs9366375 |
| 21187610 | rs4310041 |
| 21187627 | rs4496780 |
| 21187688 | rs7750461 |
| 21187916 | rs6917272 |
| 21188170 | rs6917904 |
| 21188430 | rs34700472 |
| 21188451 | rs9350318 |
| 21189185 | rs4323302 |
| 21189629 | rs9366376 |
| 21189885 | rs10456237 |
| 21189931 | rs13219886 |
| 21190084 | rs9368272 |
| 21190476 | rs35189729 |
| 21191594 | rs6904648 |
| 21191595 | rs11751563 |
| 21191595 | rs35898656 |
| 21192182 | rs4593348 |
| 21192409 | rs4421186 |
| 21192801 | rs6915237 |
| 21193447 | rs7773973 |
| 21193514 | rs17834555 |
| 21193811 | rs6901354 |
| 21194026 | rs4130033 |
| 21194285 | rs35287977 |
| 21194419 | rs10806931 |
| 21194732 | rs11964144 |
| 21194764 | rs10946428 |
| 21196061 | rs12200487 |
| 21196232 | rs4712581 |
| 21196650 | rs6456395 |
| 21196835 | rs6456396 |
| 21197051 | rs9368273 |
| 21197394 | rs4712582 |
| 21198212 | rs34465715 |
| 21198601 | rs6904348 |
| 21199015 | rs11433815 |
| 21199016 | rs36110847 |
| 21199138 | rs9368274 |
| 21199756 | rs12197841 |
| 21199815 | rs12197853 |
| 21199817 | rs12197854 |
| 21200342 | rs7762660 |
| 21200361 | rs7762670 |
| 21200554 | rs7762964 |
| 21200605 | rs13210302 |
| 21200944 | rs34756370 |
| 21201333 | rs7768086 |
| 21201341 | rs13214341 |
| 21202104 | rs33945169 |
| 21202717 | rs6939622 |
| 21202933 | rs4454125 |
| 21203121 | rs4401656 |
| 21204432 | rs11969472 |
| 21204602 | rs9358389 |
| 21204788 | rs4712583 |
| 21205444 | rs11757261 |
| 21205844 | rs34430280 |
| 21206360 | rs11757901 |
| 21206756 | rs34764667 |
| 21206833 | rs35866346 |
| 21207116 | rs9465965 |
| 21207331 | rs7744319 |
| 21207645 | rs9368275 |
| 21207687 | rs9356762 |
| 21208023 | rs9350319 |
| 21208328 | rs9350320 |
| 21208606 | rs9366377 |
| 21208909 | rs5874801 |
| 21209654 | rs9368276 |
| 21210536 | rs4712584 |
| 21210553 | rs34092761 |
| 21210726 | rs9366378 |
| 21211436 | rs11968036 |
| 21211664 | rs9465966 |
| 21211803 | rs4569951 |
| 21212138 | rs4130302 |
| 21212414 | rs35081613 |
| 21212547 | rs9358390 |
| 21212715 | rs6925464 |
| 21212715 | rs9460596 |
| 21212847 | rs17834987 |
| 21213142 | rs12529531 |
| 21213851 | rs36086759 |
| 21214087 | rs6936205 |
| 21215067 | rs4574622 |
| 21215086 | rs9465967 |
| 21215088 | rs9358391 |
| 21215150 | rs35347692 |
| 21215159 | rs5874802 |
| 21215207 | rs4624863 |
| 21215258 | rs9465968 |
| 21215359 | rs4526186 |
| 21215371 | rs34865903 |
| 21215437 | rs7739050 |
| 21215448 | rs4326226 |
| 21216093 | rs4712585 |
| 21216145 | rs9356763 |
| 21216170 | rs4710964 |
| 21216871 | rs9460597 |
| 21218688 | rs11963150 |
| 21218907 | rs6923546 |
| 21219519 | rs6924221 |
| 21220306 | rs10456238 |
| 21222458 | rs34418857 |
| 21222459 | rs34251532 |
| 21222460 | rs34219362 |
| 21222644 | rs35962170 |
| 21223003 | rs16884514 |
| 21223188 | rs7773318 |
| 21223279 | rs4340995 |
| 21223295 | rs9356764 |
| 21224572 | rs35468559 |
| 21224879 | rs3935207 |
| 21224965 | rs35629967 |
| 21225019 | rs6927498 |
| 21225119 | rs10613278 |
| 21225499 | rs35372171 |
| 21225513 | rs10554335 |
| 21225585 | rs7764365 |
| 21225685 | rs35234206 |
| 21225694 | rs11418036 |
| 21225734 | rs7768536 |
| 21226218 | rs4389757 |
| 21227109 | rs6456397 |
| 21227703 | rs35183051 |
| 21228007 | rs7741436 |
| 21228269 | rs9356765 |
| 21228407 | rs9366379 |
| 21228562 | rs6926818 |
| 21228614 | rs16884524 |
| 21228619 | rs34425854 |
| 21228733 | rs4074910 |
| 21228748 | rs4076112 |
| 21229002 | rs35885025 |
| 21229134 | rs6909332 |
| 21229654 | rs4438948 |
| 21229845 | rs6905660 |
| 21230834 | rs9358392 |
| 21231054 | rs9368279 |
| 21231899 | rs4315997 |
| 21231967 | rs4479917 |
| 21232500 | rs10946430 |
| 21232701 | rs34821627 |
| 21232763 | rs13191691 |
| 21232779 | rs13207763 |
| 21232796 | rs13207766 |
| 21232816 | rs13191830 |
| 21233338 | rs34857211 |
| 21234866 | rs7750839 |
| 21235291 | rs7751485 |
| 21235577 | rs11757294 |
| 21235798 | rs34183889 |
| 21236043 | rs12055489 |
| 21236223 | rs28421119 |
| 21237436 | rs9295493 |
| 21237650 | rs12055790 |
| 21237696 | rs35692444 |
| 21237763 | rs7766575 |
| 21237890 | rs9356766 |
| 21237892 | rs34802727 |
| 21237915 | rs35927368 |
| 21238432 | rs10708944 |
| 21238635 | rs6932722 |
| 21238849 | rs6937439 |
| 21238961 | rs9986401 |
| 21239004 | rs9465969 |
| 21239122 | rs9986662 |
| 21239291 | rs9295494 |
| 21239512 | rs35030599 |
| 21240132 | rs9460598 |
| 21240526 | rs28403910 |
| 21241995 | rs9465970 |
| 21242670 | rs7760880 |
| 21242672 | rs7761283 |
| 21242682 | rs11463641 |
| 21242783 | rs7765177 |
| 21242820 | rs7765199 |
| 21242857 | rs7764887 |
| 21243009 | rs7765106 |
| 21243039 | rs28610069 |
| 21243105 | rs7765274 |
| 21243107 | rs2446490 |
| 21243137 | rs2493869 |
| 21243228 | rs7765725 |
| 21243240 | rs7765730 |
| 21243646 | rs16884554 |
| 21243857 | rs13216162 |
| 21244099 | rs2446489 |
| 21244512 | rs2446488 |
| 21244516 | rs7771907 |
| 21245195 | rs9350322 |
| 21245369 | rs2446487 |
| 21246042 | rs35201465 |
| 21246079 | rs9358393 |
| 21246445 | rs959712 |
| 21246447 | rs35541643 |
| 21246451 | rs34848377 |
| 21246456 | rs5874803 |
| 21246457 | rs33951051 |
| 21246458 | rs5874804 |
| 21246459 | rs35717786 |
| 21246466 | rs5874805 |
| 21246467 | rs35384149 |
| 21246474 | rs959711 |
| 21246487 | rs34589183 |
| 21246785 | rs9688559 |
| 21246915 | rs9689353 |
| 21246958 | rs34154291 |
| 21246988 | rs9688564 |
| 21246992 | rs9688565 |
| 21247009 | rs2446486 |
| 21247020 | rs9688569 |
| 21247061 | rs9688573 |
| 21247079 | rs9295495 |
| 21247094 | rs9465971 |
| 21247737 | rs9460599 |
| 21247746 | rs6916667 |
| 21247788 | rs9465972 |
| 21248278 | rs2446485 |
| 21248465 | rs2446484 |
| 21249707 | rs28665959 |
| 21249879 | rs35583136 |
| 21249895 | rs34896971 |
| 21249984 | rs7746383 |
| 21250235 | rs7746846 |
| 21250457 | rs28360550 |
| 21250639 | rs6932702 |
| 21251345 | rs9348456 |
| 21251752 | rs35724409 |
| 21251989 | rs2328573 |
| 21252098 | rs17835633 |
| 21252216 | rs36008085 |
| 21252578 | rs10498701 |
| 21252578 | rs35938718 |
| 21252735 | rs34957382 |
| 21253603 | rs10708192 |
| 21254245 | rs1466340 |
| 21255061 | rs10710231 |
| 21255726 | rs1466339 |
| 21255824 | rs7740358 |
| 21256011 | rs11405792 |
| 21256411 | rs1471205 |
| 21256721 | rs9368280 |
| 21257043 | rs9295496 |
| 21257242 | rs12206028 |
| 21257356 | rs9368281 |
| 21258107 | rs2168985 |
| 21258129 | rs12207912 |
| 21258136 | rs35882470 |
| 21258203 | rs9368282 |
| 21258436 | rs7752602 |
| 21258626 | rs7752788 |
| 21258747 | rs2446483 |
| 21258795 | rs9356768 |
| 21258995 | rs34495814 |
| 21259344 | rs9350323 |
| 21259352 | rs4530843 |
| 21259489 | rs9460600 |
| 21259600 | rs9460601 |
| 21260113 | rs10946431 |
| 21260135 | rs35088240 |
| 21260216 | rs10946432 |
| 21260253 | rs10946433 |
| 21260917 | rs11961031 |
| 21261341 | rs4144175 |
| 21261468 | rs10604354 |
| 21261575 | rs12203853 |
| 21261620 | rs6901380 |
| 21261891 | rs6906201 |
| 21262118 | rs9460602 |
| 21262389 | rs35396145 |
| 21262741 | rs9350324 |
| 21262775 | rs9295497 |
| 21262969 | rs9366381 |
| 21263128 | rs6456398 |
| 21263152 | rs6456399 |
| 21263168 | rs6456400 |
| 21263322 | rs6456401 |
| 21263462 | rs11456476 |
| 21263471 | rs34116986 |
| 21263595 | rs6913868 |
| 21263798 | rs9366382 |
| 21263882 | rs9348457 |
| 21264053 | rs35931974 |
| 21264270 | rs9366383 |
| 21264385 | rs9366384 |
| 21264393 | rs9356769 |
| 21264732 | rs34306955 |
| 21264842 | rs9350325 |
| 21264968 | rs6924598 |
| 21265017 | rs4712586 |
| 21265065 | rs7761116 |
| 21265072 | rs9358395 |
| 21265152 | rs9368283 |
| 21265828 | rs34689265 |
| 21266252 | rs6931316 |
| 21267009 | rs6916577 |
| 21267167 | rs6937555 |
| 21267311 | rs10645059 |
| 21267321 | rs10652396 |
| 21267832 | rs16884591 |
| 21268027 | rs11442196 |
| 21268361 | rs7739578 |
| 21268400 | rs7739596 |
| 21268426 | rs4527692 |
| 21268664 | rs9295498 |
| 21268668 | rs9295499 |
| 21268866 | rs10080292 |
| 21268870 | rs35915482 |
| 21268881 | rs9465976 |
| 21268928 | rs28581582 |
| 21268942 | rs34844023 |
| 21269038 | rs12179712 |
| 21269039 | rs9465977 |
| 21269504 | rs9465978 |
| 21271039 | rs6929437 |
| 21271299 | rs4995985 |
| 21271738 | rs34031561 |
| 21271898 | rs6914598 |
| 21272056 | rs6935079 |
| 21272110 | rs6935117 |
| 21272124 | rs6935124 |
| 21272174 | rs9368284 |
| 21272190 | rs6915161 |
| 21272228 | rs9356770 |
| 21272416 | rs35558562 |
| 21272655 | rs6916053 |
| 21272716 | rs34191499 |
| 21273107 | rs6941714 |
| 21273161 | rs34326160 |
| 21273168 | rs9460603 |
| 21273192 | rs9348458 |
| 21273257 | rs7776158 |
| 21273274 | rs11965768 |
| 21274046 | rs35674401 |
| 21274684 | rs2125570 |
| 21275213 | rs7768526 |
| 21275957 | rs9368285 |
| 21276570 | rs28360551 |
| 21277729 | rs7763700 |
| 21277824 | rs4425589 |
| 21277964 | rs9348459 |
| 21278549 | rs13197595 |
| 21278592 | rs9460604 |
| 21278780 | rs12180174 |
| 21278845 | rs9465979 |
| 21279293 | rs36058161 |
| 21279338 | rs11969929 |
| 21279609 | rs11965049 |
| 21279673 | rs9295500 |
| 21279689 | rs34012677 |
| 21279828 | rs12178179 |
| 21279839 | rs9465980 |
| 21280353 | rs9358396 |
| 21281052 | rs12194541 |
| 21281118 | rs2061441 |
| 21281632 | rs9460605 |
| 21281781 | rs12525339 |
| 21282235 | rs35462438 |
| 21282590 | rs9465981 |
| 21282848 | rs4637624 |
| 21282946 | rs35969558 |
| 21283471 | rs12525940 |
| 21283655 | rs34603118 |
| 21283948 | rs12528104 |
| 21284103 | rs12526391 |
| 21284906 | rs6939148 |
| 21284912 | rs9460606 |
| 21285561 | rs13219281 |
| 21285569 | rs13219285 |
| 21285598 | rs13219506 |
| 21285611 | rs13219193 |
| 21285620 | rs13219198 |
| 21285664 | rs13219637 |
| 21285689 | rs13205078 |
| 21285691 | rs13205079 |
| 21285875 | rs11308599 |
| 21286261 | rs9465982 |
| 21288187 | rs12214946 |
| 21288554 | rs34495587 |
| 21289215 | rs12523755 |
| 21289629 | rs35642303 |
| 21290957 | rs9295501 |
| 21291348 | rs35815279 |
| 21291533 | rs12527222 |
| 21291647 | rs9465983 |
| 21291857 | rs2493868 |
| 21291918 | rs35979352 |
| 21292407 | rs34248538 |
| 21292789 | rs10946434 |
| 21292811 | rs9465984 |
| 21293033 | rs34599800 |
| 21293434 | rs35442433 |
| 21293569 | rs9465985 |
| 21294166 | rs35712201 |
| 21294748 | rs35539626 |
| 21294750 | rs9465986 |
| 21294751 | rs9465987 |
| 21294801 | rs11961469 |
| 21295134 | rs2446482 |
| 21295312 | rs9465988 |
| 21295313 | rs12191416 |
| 21295313 | rs35985333 |
| 21295996 | rs9465989 |
| 21296793 | rs9350327 |
| 21297183 | rs34750271 |
| 21297265 | rs35013686 |
| 21297416 | rs16884616 |
| 21297902 | rs35898446 |
| 21297924 | rs11751020 |
| 21297967 | rs10452581 |
| 21298562 | rs13192000 |
| 21298563 | rs13191669 |
| 21298583 | rs13192011 |
| 21298617 | rs13192029 |
| 21298629 | rs13192143 |
| 21298630 | rs13207866 |
| 21298671 | rs13191819 |
| 21298690 | rs13192164 |
| 21298721 | rs13192173 |
| 21298723 | rs13191845 |
| 21299659 | rs9465990 |
| 21299810 | rs9460607 |
| 21299907 | rs9465991 |
| 21299909 | rs9366386 |
| 21299971 | rs35944981 |
| 21300001 | rs9366387 |
| 21300046 | rs9366388 |
| 21300106 | rs9368287 |
| 21300203 | rs13193222 |
| 21300325 | rs10080974 |
| 21300381 | rs9295502 |
| 21300388 | rs12528974 |
| 21300395 | rs7759646 |
| 21300433 | rs9465992 |
| 21300768 | rs11964193 |
| 21301021 | rs34456723 |
| 21301080 | rs34094109 |
| 21301834 | rs11759448 |
| 21302380 | rs11962770 |
| 21303198 | rs9366389 |
| 21303687 | rs11753415 |
| 21304730 | rs4712587 |
| 21304976 | rs7748091 |
| 21305299 | rs28469715 |
| 21305355 | rs7748766 |
| 21305591 | rs35164470 |
| 21305660 | rs2125571 |
| 21305669 | rs9465993 |
| 21306062 | rs3793090 |
| 21307994 | rs1531303 |
| 21308261 | rs2305955 |
| 21308369 | rs1459047 |
| 21309244 | rs35662535 |
| 21309281 | rs9767650 |
| 21309286 | rs9767186 |
| 21309387 | rs9460608 |
| 21309472 | rs9465994 |
| 21310133 | rs9465995 |
| 21310563 | rs36067162 |
| 21310749 | rs11965158 |
| 21311344 | rs9350328 |
| 21311426 | rs5874806 |
| 21311451 | rs10616274 |
| 21311452 | rs5874807 |
| 21311454 | rs11288843 |
| 21311471 | rs9350329 |
| 21311502 | rs1824330 |
| 21311620 | rs9717950 |
| 21311710 | rs3898487 |
| 21311900 | rs9350330 |
| 21311902 | rs9350331 |
| 21312023 | rs35603064 |
| 21312085 | rs35615714 |
| 21312109 | rs36017220 |
| 21312120 | rs12196363 |
| 21312143 | rs35881379 |
| 21312153 | rs35710688 |
| 21312177 | rs35017881 |
| 21312188 | rs12196418 |
| 21312191 | rs12196419 |
| 21312206 | rs35883368 |
| 21312223 | rs12196423 |
| 21312231 | rs34046809 |
| 21312253 | rs34108390 |
| 21312453 | rs6921264 |
| 21312671 | rs6921652 |
| 21312775 | rs6926388 |
| 21312801 | rs12527588 |
| 21313200 | rs10456240 |
| 21313329 | rs10456241 |
| 21313367 | rs10456242 |
| 21313458 | rs10456243 |
| 21313856 | rs34046046 |
| 21313879 | rs13213969 |
| 21313886 | rs6932316 |
| 21313910 | rs6932752 |
| 21313958 | rs13214311 |
| 21313963 | rs6932914 |
| 21313998 | rs6932635 |
| 21314018 | rs6912407 |
| 21314041 | rs34849597 |
| 21314107 | rs9366390 |
| 21314243 | rs10223539 |
| 21314298 | rs10223540 |
| 21314473 | rs6913302 |
| 21315081 | rs9366391 |
| 21315139 | rs9356771 |
| 21315390 | rs12530254 |
| 21315432 | rs34085972 |
| 21315529 | rs4291091 |
| 21315727 | rs6940465 |
| 21315763 | rs6901748 |
| 21316195 | rs6902505 |
| 21316396 | rs898167 |
| 21316398 | rs898166 |
| 21316408 | rs898165 |
| 21316820 | rs34797264 |
| 21317102 | rs9368288 |
| 21317206 | rs9358397 |
| 21317611 | rs2168984 |
| 21317978 | rs1563728 |
| 21318135 | rs4712588 |
| 21318266 | rs11267610 |
| 21318399 | rs4712589 |
| 21318666 | rs6915037 |
| 21318882 | rs12664336 |
| 21319431 | rs9465998 |
| 21319494 | rs10214790 |
| 21319776 | rs12201217 |
| 21320060 | rs9350332 |
| 21320905 | rs9358398 |
| 21321149 | rs9358399 |
| 21321286 | rs9358400 |
| 21321533 | rs10214694 |
| 21321733 | rs10214716 |
| 21322176 | rs9460609 |
| 21322179 | rs6929219 |
| 21322517 | rs12527686 |
| 21322561 | rs12527673 |
| 21322733 | rs9350333 |
| 21323322 | rs10946436 |
| 21323380 | rs6913136 |
| 21323400 | rs13200114 |
| 21323464 | rs13200422 |
| 21323815 | rs2328572 |
| 21323949 | rs9350334 |
| 21324672 | rs34913347 |
| 21324713 | rs10946437 |
| 21324725 | rs10946438 |
| 21325164 | rs9358401 |
| 21325261 | rs34055473 |
| 21325350 | rs34921405 |
| 21325357 | rs6904880 |
| 21325395 | rs6456403 |
| 21325653 | rs2085654 |
| 21325832 | rs9466000 |
| 21325853 | rs9466001 |
| 21326033 | rs2100707 |
| 21326158 | rs12111402 |
| 21326366 | rs4712590 |
| 21326649 | rs4710965 |
| 21327416 | rs6937610 |
| 21327459 | rs12110862 |
| 21327488 | rs35624914 |
| 21327606 | rs11349673 |
| 21327854 | rs16884681 |
| 21327895 | rs7738425 |
| 21328030 | rs16884685 |
| 21328355 | rs16884688 |
| 21328398 | rs35663664 |
| 21328510 | rs12203389 |
| 21328818 | rs12191541 |
| 21328946 | rs34618548 |
| 21330074 | rs1563726 |
| 21330730 | rs16884693 |
| 21331119 | rs2328574 |
| 21331209 | rs16884699 |
| 21331264 | rs16884705 |
| 21331267 | rs6929141 |
| 21331293 | rs16884709 |
| 21331392 | rs16884713 |
| 21332034 | rs9466002 |
| 21332081 | rs9466003 |
| 21332103 | rs9466004 |
| 21332139 | rs9466005 |
| 21332272 | rs9460610 |
| 21332409 | rs7770316 |
| 21332488 | rs11964983 |
| 21332496 | rs7770752 |
| 21332625 | rs7770637 |
| 21333229 | rs1870421 |
| 21333556 | rs6942273 |
| 21333618 | rs9466006 |
| 21333709 | rs9466007 |
| 21334500 | rs7763249 |
| 21335731 | rs9368289 |
| 21335750 | rs9368290 |
| 21335782 | rs13202305 |
| 21335903 | rs34362358 |
| 21335906 | rs11415596 |
| 21336317 | rs28484932 |
| 21336582 | rs7754027 |
| 21336699 | rs34022115 |
| 21336867 | rs4710966 |
| 21337512 | rs16884722 |
| 21338182 | rs35571136 |
| 21338184 | rs35739791 |
| 21338815 | rs9460611 |
| 21338986 | rs9460612 |
| 21339013 | rs12200511 |
| 21339097 | rs35791563 |
| 21339201 | rs34084405 |
| 21339207 | rs34158326 |
| 21339453 | rs1563727 |
| 21339524 | rs3840416 |
| 21339530 | rs11362523 |
| 21339688 | rs7770664 |
| 21339861 | rs35121088 |
| 21339935 | rs4712591 |
| 21340199 | rs35206923 |
| 21340202 | rs28600127 |
| 21340213 | rs4710967 |
| 21340214 | rs4710968 |
| 21340218 | rs13213171 |
| 21340219 | rs13197226 |
| 21340225 | rs12199601 |
| 21340594 | rs1137970 |

TABLE 10
SNPs within LD block C06 (SEQ ID NO: 1) between positions
20,634,996 and 20,836,710 bp on Chromosome 6 in NCBI Build 35
and NCBI Build 36

| | Position in | |
|---|---|---|
| Position in | SEQ ID | |
| Build 35/36 | NO: 1 | Marker ID |
| 20634996 | 1 | rs4429936 |
| 20635028 | 33 | rs9465780 |
| 20635060 | 65 | rs7743222 |
| 20635066 | 71 | rs7743223 |
| 20635241 | 246 | rs4516938 |
| 20635285 | 290 | rs4628090 |
| 20635339 | 344 | rs9465781 |
| 20635349 | 354 | rs28450063 |
| 20635350 | 355 | rs9465782 |
| 20635834 | 839 | rs4712503 |
| 20635845 | 850 | rs9465783 |
| 20635860 | 865 | rs4712504 |
| 20636037 | 1042 | rs10946388 |
| 20636813 | 1818 | rs9460517 |
| 20636939 | 1944 | rs34086777 |
| 20637089 | 2094 | rs9465785 |
| 20637215 | 2220 | rs7754223 |
| 20637279 | 2284 | rs34173688 |
| 20637287 | 2292 | rs11459684 |
| 20637288 | 2293 | rs35781726 |
| 20637303 | 2308 | rs9460518 |
| 20637450 | 2455 | rs11362835 |
| 20637521 | 2526 | rs7772956 |
| 20637824 | 2829 | rs1883641 |
| 20637875 | 2880 | rs1883640 |
| 20637944 | 2949 | rs11402844 |
| 20638219 | 3224 | rs35198704 |
| 20638372 | 3377 | rs6923683 |
| 20638762 | 3767 | rs12181295 |
| 20638829 | 3834 | rs9465788 |
| 20638961 | 3966 | rs34578766 |
| 20639509 | 4514 | rs2206578 |
| 20639662 | 4667 | rs35530523 |
| 20639708 | 4713 | rs2206577 |
| 20639710 | 4715 | rs34553771 |
| 20639718 | 4723 | rs34581322 |
| 20639719 | 4724 | rs5874771 |
| 20639909 | 4914 | rs6902897 |
| 20640005 | 5010 | rs34607984 |
| 20640118 | 5123 | rs6923201 |
| 20640162 | 5167 | rs6903415 |
| 20640249 | 5254 | rs9465790 |
| 20640425 | 5430 | rs6923750 |
| 20640859 | 5864 | rs10717803 |
| 20641038 | 6043 | rs9465791 |
| 20641141 | 6146 | rs6909467 |
| 20641248 | 6253 | rs34525680 |
| 20641293 | 6298 | rs35457534 |
| 20641299 | 6304 | rs35731703 |
| 20641303 | 6308 | rs10554680 |
| 20641320 | 6325 | rs35239102 |
| 20641362 | 6367 | rs9368197 |
| 20641413 | 6418 | rs9465792 |
| 20641494 | 6499 | rs12212722 |
| 20641581 | 6586 | rs7765611 |
| 20641590 | 6595 | rs10566792 |
| 20641598 | 6603 | rs10566793 |
| 20641718 | 6723 | rs34275610 |
| 20641718 | 6723 | rs10566794 |
| 20641724 | 6729 | rs11347538 |
| 20641733 | 6738 | rs5874772 |
| 20642073 | 7078 | rs16883887 |
| 20642385 | 7390 | rs34088191 |
| 20642428 | 7433 | rs10806920 |
| 20642440 | 7445 | rs11370426 |
| 20642441 | 7446 | rs33915274 |
| 20642442 | 7447 | rs11459775 |
| 20642443 | 7448 | rs34576540 |
| 20642494 | 7499 | rs10708068 |
| 20642586 | 7591 | rs4712505 |
| 20642787 | 7792 | rs41271303 |
| 20642953 | 7958 | rs11963450 |
| 20643397 | 8402 | rs981043 |
| 20643513 | 8518 | rs981042 |
| 20643675 | 8680 | rs16883895 |
| 20643753 | 8758 | rs17512225 |
| 20643840 | 8845 | rs35035071 |
| 20643949 | 8954 | rs6904566 |
| 20644073 | 9078 | rs6927356 |
| 20644093 | 9098 | rs35281412 |
| 20644313 | 9318 | rs35915788 |
| 20644314 | 9319 | rs34025398 |
| 20644320 | 9325 | rs34361235 |
| 20644335 | 9340 | rs6905138 |
| 20644499 | 9504 | rs13194858 |
| 20644717 | 9722 | rs2179551 |
| 20644727 | 9732 | rs2179550 |
| 20644787 | 9792 | rs9465794 |
| 20644787 | 9792 | rs9465795 |
| 20644848 | 9853 | rs7747962 |
| 20644858 | 9863 | rs6910725 |
| 20644918 | 9923 | rs965054 |
| 20644971 | 9976 | rs2143407 |
| 20645032 | 10037 | rs10619380 |
| 20645431 | 10436 | rs2328525 |
| 20645661 | 10666 | rs13199286 |
| 20645841 | 10846 | rs10611252 |
| 20645940 | 10945 | rs7753499 |
| 20646023 | 11028 | rs7753956 |
| 20646024 | 11029 | rs34811195 |
| 20646024 | 11029 | rs7753670 |
| 20646107 | 11112 | rs3060613 |
| 20646107 | 11112 | rs6149468 |
| 20646109 | 11114 | rs11277970 |
| 20646110 | 11115 | rs11280099 |
| 20646139 | 11144 | rs16883900 |
| 20646175 | 11180 | rs7774291 |
| 20646443 | 11448 | rs10612082 |
| 20646476 | 11481 | rs9368198 |
| 20646502 | 11507 | rs13203336 |
| 20646504 | 11509 | rs13203631 |
| 20646619 | 11624 | rs6456355 |
| 20646644 | 11649 | rs10484635 |
| 20647190 | 12195 | rs12204173 |
| 20647320 | 12325 | rs13207544 |
| 20647851 | 12856 | rs12198728 |
| 20647984 | 12989 | rs28396084 |
| 20648327 | 13332 | rs12199073 |
| 20648500 | 13505 | rs9465796 |
| 20648561 | 13566 | rs12212600 |
| 20648596 | 13601 | rs13212040 |
| 20648663 | 13668 | rs35291340 |
| 20648722 | 13727 | rs12199324 |
| 20649085 | 14090 | rs12200871 |
| 20649159 | 14164 | rs9348432 |
| 20649183 | 14188 | rs12200834 |
| 20649236 | 14241 | rs34860173 |
| 20649324 | 14329 | rs11754872 |
| 20649498 | 14503 | rs6456356 |
| 20649517 | 14522 | rs9368199 |
| 20649682 | 14687 | rs2143406 |
| 20650176 | 15181 | rs10484634 |
| 20650200 | 15205 | rs7758851 |
| 20650398 | 15403 | rs34677076 |
| 20651447 | 16452 | rs6928571 |
| 20651461 | 16466 | rs12192584 |
| 20651608 | 16613 | rs34856684 |
| 20652015 | 17020 | rs9350255 |
| 20652091 | 17096 | rs9368200 |
| 20652136 | 17141 | rs12214002 |
| 20652245 | 17250 | rs9465797 |
| 20652300 | 17305 | rs9465798 |
| 20652574 | 17579 | rs28699301 |
| 20652650 | 17655 | rs13215844 |
| 20652678 | 17683 | rs12214315 |
| 20652722 | 17727 | rs11759517 |
| 20652786 | 17791 | rs13218957 |
| 20652806 | 17811 | rs13218962 |
| 20653188 | 18193 | rs10543744 |
| 20653201 | 18206 | rs12216047 |
| 20653447 | 18452 | rs9366354 |
| 20653890 | 18895 | rs9358342 |
| 20654091 | 19096 | rs9368201 |
| 20654382 | 19387 | rs34206163 |
| 20654506 | 19511 | rs9465799 |
| 20654794 | 19799 | rs34187071 |
| 20654867 | 19872 | rs9465800 |
| 20654890 | 19895 | rs6908974 |
| 20654992 | 19997 | rs13197372 |
| 20655361 | 20366 | rs13214145 |
| 20655793 | 20798 | rs16883910 |
| 20655968 | 20973 | rs12194705 |
| 20656271 | 21276 | rs35080661 |
| 20656465 | 21470 | rs7753467 |
| 20656466 | 21471 | rs7773488 |
| 20656986 | 21991 | rs34182285 |
| 20657084 | 22089 | rs34242699 |
| 20657780 | 22785 | rs9348433 |
| 20657942 | 22947 | rs9460519 |
| 20658083 | 23088 | rs12198377 |
| 20658096 | 23101 | rs9465801 |
| 20658195 | 23200 | rs9465802 |
| 20658822 | 23827 | rs28458932 |
| 20658823 | 23828 | rs9465803 |
| 20658981 | 23986 | rs2103682 |
| 20659321 | 24326 | rs9465804 |
| 20659580 | 24585 | rs34611621 |
| 20660058 | 25063 | rs12055423 |
| 20660653 | 25658 | rs9465805 |
| 20660829 | 25834 | rs11365187 |
| 20660836 | 25841 | rs11320714 |
| 20660918 | 25923 | rs9350256 |
| 20661764 | 26769 | rs7756211 |
| 20662069 | 27074 | rs9460520 |
| 20662498 | 27503 | rs34245467 |
| 20662930 | 27935 | rs9350257 |
| 20663855 | 28860 | rs11964554 |
| 20663990 | 28995 | rs9465806 |
| 20664109 | 29114 | rs11964635 |
| 20664190 | 29195 | rs13199421 |
| 20664314 | 29319 | rs6932320 |
| 20664570 | 29575 | rs12200078 |
| 20664659 | 29664 | rs13437555 |
| 20664884 | 29889 | rs9350258 |
| 20665256 | 30261 | rs12176441 |
| 20665260 | 30265 | rs12183826 |
| 20665264 | 30269 | rs9356738 |
| 20665272 | 30277 | rs9348434 |
| 20665343 | 30348 | rs9465807 |
| 20665804 | 30809 | rs4458667 |
| 20665995 | 31000 | rs7739402 |
| 20667590 | 32595 | rs16883914 |
| 20667591 | 32596 | rs16883916 |
| 20667900 | 32905 | rs9654584 |
| 20667999 | 33004 | rs9465808 |
| 20668414 | 33419 | rs17584626 |
| 20668565 | 33570 | rs7751682 |
| 20669667 | 34672 | rs11361279 |
| 20669681 | 34686 | rs34634263 |
| 20670059 | 35064 | rs12214549 |
| 20670364 | 35369 | rs7753519 |
| 20670575 | 35580 | rs28567007 |
| 20670597 | 35602 | rs7772137 |
| 20670719 | 35724 | rs12208597 |
| 20670998 | 36003 | rs9368202 |
| 20671877 | 36882 | rs2328526 |
| 20672452 | 37457 | rs34823358 |
| 20673287 | 38292 | rs28639914 |
| 20673363 | 38368 | rs34233572 |
| 20673415 | 38420 | rs4712506 |
| 20673935 | 38940 | rs13203450 |
| 20674280 | 39285 | rs9350259 |
| 20674435 | 39440 | rs6918457 |
| 20674595 | 39600 | rs35210537 |
| 20674749 | 39754 | rs11329887 |
| 20675016 | 40021 | rs9348435 |
| 20675068 | 40073 | rs35366106 |
| 20675342 | 40347 | rs16901563 |
| 20675352 | 40357 | rs12333229 |
| 20675520 | 40525 | rs9460521 |
| 20676094 | 41099 | rs10589899 |
| 20676351 | 41356 | rs2876573 |
| 20676957 | 41962 | rs6935461 |
| 20676963 | 41968 | rs6935465 |
| 20676968 | 41973 | rs10603174 |
| 20677060 | 42065 | rs12333291 |
| 20677967 | 42972 | rs2064321 |
| 20677985 | 42990 | rs35546893 |
| 20678018 | 43023 | rs4291090 |
| 20678121 | 43126 | rs2064320 |
| 20678268 | 43273 | rs9465810 |
| 20678275 | 43280 | rs9465811 |
| 20678423 | 43428 | rs9358344 |
| 20678756 | 43761 | rs10946390 |
| 20679114 | 44119 | rs6905281 |
| 20679339 | 44344 | rs16883932 |
| 20679612 | 44617 | rs34904067 |
| 20679660 | 44665 | rs7744002 |
| 20679763 | 44768 | rs35142564 |
| 20680095 | 45100 | rs9465812 |
| 20680678 | 45683 | rs7759094 |
| 20680784 | 45789 | rs9460522 |
| 20681538 | 46543 | rs7764551 |
| 20681585 | 46590 | rs10541455 |
| 20682409 | 47414 | rs16883935 |
| 20682542 | 47547 | rs13215603 |
| 20682568 | 47573 | rs962576 |
| 20683235 | 48240 | rs1474720 |
| 20683797 | 48802 | rs16883944 |
| 20684155 | 49160 | rs34538343 |
| 20684269 | 49274 | rs9350260 |
| 20684353 | 49358 | rs16883951 |
| 20684645 | 49650 | rs9358345 |
| 20684862 | 49867 | rs1012627 |
| 20684890 | 49895 | rs9368203 |
| 20684939 | 49944 | rs35894322 |
| 20684965 | 49970 | rs4710932 |
| 20684984 | 49989 | rs6909117 |
| 20685540 | 50545 | rs1012626 |
| 20685748 | 50753 | rs1012625 |
| 20685760 | 50765 | rs7752194 |
| 20685958 | 50963 | rs9465813 |
| 20686014 | 51019 | rs12207923 |
| 20686355 | 51360 | rs16883963 |
| 20686831 | 51836 | rs13205786 |
| 20686887 | 51892 | rs35205364 |
| 20687102 | 52107 | rs10456232 |
| 20687189 | 52194 | rs9465814 |
| 20687201 | 52206 | rs35571892 |
| 20687740 | 52745 | rs9465815 |
| 20687753 | 52758 | rs36119371 |
| 20687921 | 52926 | rs28621813 |
| 20687926 | 52931 | rs9350261 |
| 20687928 | 52933 | rs7341226 |
| 20688175 | 53180 | rs6927481 |
| 20688323 | 53328 | rs35313444 |
| 20688373 | 53378 | rs6928198 |
| 20688404 | 53409 | rs6907897 |
| 20688545 | 53550 | rs6928586 |
| 20688872 | 53877 | rs9368204 |
| 20689021 | 54026 | rs9358346 |
| 20689589 | 54594 | rs11967546 |
| 20689593 | 54598 | rs34134803 |
| 20689772 | 54777 | rs10456233 |
| 20689807 | 54812 | rs7744833 |
| 20690123 | 55128 | rs9460523 |
| 20690123 | 55128 | rs9465816 |
| 20690432 | 55437 | rs6908077 |
| 20690630 | 55635 | rs9465817 |
| 20691069 | 56074 | rs11967445 |
| 20691263 | 56268 | rs34022950 |
| 20691793 | 56798 | rs9460524 |
| 20691994 | 56999 | rs34020592 |
| 20692003 | 57008 | rs11448102 |
| 20692339 | 57344 | rs9465818 |
| 20692402 | 57407 | rs9350262 |
| 20692513 | 57518 | rs13205241 |
| 20693000 | 58005 | rs12153939 |
| 20693100 | 58105 | rs6925593 |
| 20693119 | 58124 | rs4712507 |
| 20693226 | 58231 | rs10558806 |
| 20693267 | 58272 | rs35982532 |
| 20693276 | 58281 | rs11385529 |
| 20693360 | 58365 | rs9348436 |
| 20693416 | 58421 | rs9368206 |
| 20693438 | 58443 | rs13209542 |
| 20693452 | 58457 | rs9368207 |
| 20693630 | 58635 | rs13209907 |
| 20693635 | 58640 | rs6926658 |
| 20694018 | 59023 | rs12213132 |
| 20694182 | 59187 | rs4357125 |
| 20694554 | 59559 | rs6932944 |
| 20694607 | 59612 | rs6932962 |
| 20695026 | 60031 | rs9348437 |
| 20695332 | 60337 | rs12201857 |
| 20695356 | 60361 | rs9465819 |
| 20695447 | 60452 | rs6938955 |
| 20695539 | 60544 | rs9460525 |
| 20695827 | 60832 | rs9465820 |
| 20695964 | 60969 | rs10946391 |
| 20695968 | 60973 | rs9368208 |
| 20696003 | 61008 | rs9465821 |
| 20696183 | 61188 | rs6923790 |
| 20696401 | 61406 | rs10558139 |
| 20697309 | 62314 | rs6907459 |
| 20697320 | 62325 | rs6907767 |
| 20697321 | 62326 | rs9465822 |
| 20697349 | 62354 | rs6930283 |
| 20697706 | 62711 | rs6908042 |
| 20697741 | 62746 | rs6935317 |
| 20697761 | 62766 | rs35370102 |
| 20698266 | 63271 | rs9368209 |
| 20698366 | 63371 | rs13216746 |
| 20698367 | 63372 | rs13216747 |
| 20699007 | 64012 | rs35485532 |
| 20699747 | 64752 | rs13216324 |
| 20699817 | 64822 | rs4336434 |
| 20700046 | 65051 | rs4509107 |
| 20700428 | 65433 | rs9465823 |
| 20700465 | 65470 | rs6936705 |
| 20700679 | 65684 | rs34023799 |
| 20700929 | 65934 | rs6942313 |
| 20701057 | 66062 | rs28869917 |
| 20701318 | 66323 | rs34982231 |
| 20701631 | 66636 | rs9358349 |
| 20701770 | 66775 | rs9460526 |
| 20701829 | 66834 | rs9366356 |
| 20702163 | 67168 | rs36120092 |
| 20702181 | 67186 | rs9465824 |
| 20702519 | 67524 | rs4712512 |
| 20702561 | 67566 | rs4712513 |
| 20702646 | 67651 | rs4710934 |
| 20702658 | 67663 | rs9348438 |
| 20702902 | 67907 | rs9460529 |
| 20703363 | 68368 | rs13199587 |
| 20703470 | 68475 | rs13199384 |
| 20703526 | 68531 | rs10223680 |
| 20703606 | 68611 | rs9350263 |
| 20703768 | 68773 | rs9465825 |
| 20703832 | 68837 | rs10223876 |
| 20704100 | 69105 | rs35702271 |
| 20704171 | 69176 | rs9358350 |
| 20704432 | 69437 | rs12208985 |
| 20704771 | 69776 | rs12210459 |
| 20704892 | 69897 | rs35431707 |
| 20705144 | 70149 | rs36039523 |
| 20705297 | 70302 | rs11758281 |
| 20705350 | 70355 | rs28893199 |
| 20705757 | 70762 | rs34256347 |
| 20706019 | 71024 | rs12192740 |
| 20706282 | 71287 | rs13212326 |
| 20706486 | 71491 | rs12199184 |
| 20706753 | 71758 | rs10456234 |
| 20707009 | 72014 | rs4712514 |
| 20707422 | 72427 | rs9465826 |
| 20707607 | 72612 | rs9366357 |
| 20707867 | 72872 | rs2294809 |
| 20708549 | 73554 | rs2294808 |
| 20708813 | 73818 | rs7762750 |
| 20708976 | 73981 | rs4712515 |
| 20708998 | 74003 | rs10522824 |
| 20708999 | 74004 | rs35660518 |
| 20709002 | 74007 | rs10679950 |
| 20709003 | 74008 | rs34870864 |
| 20709022 | 74027 | rs4712516 |
| 20709145 | 74150 | rs4710935 |
| 20709386 | 74391 | rs9465827 |
| 20709388 | 74393 | rs12204865 |
| 20709672 | 74677 | rs10946393 |
| 20709764 | 74769 | rs12209806 |
| 20709894 | 74899 | rs10946394 |
| 20709921 | 74926 | rs1997778 |
| 20709971 | 74976 | rs35878587 |
| 20710359 | 75364 | rs1997777 |
| 20710378 | 75383 | rs2223622 |
| 20710776 | 75781 | rs11964057 |
| 20711246 | 76251 | rs9460530 |
| 20711344 | 76349 | rs9460531 |
| 20711376 | 76381 | rs34329159 |
| 20711640 | 76645 | rs7764558 |
| 20711804 | 76809 | rs4710936 |
| 20712056 | 77061 | rs12213940 |
| 20712228 | 77233 | rs13215038 |
| 20712739 | 77744 | rs10946395 |
| 20712832 | 77837 | rs6939917 |
| 20712975 | 77980 | rs9358351 |
| 20713800 | 78805 | rs6925097 |
| 20713924 | 78929 | rs9465828 |
| 20713955 | 78960 | rs9465829 |
| 20713961 | 78966 | rs6902661 |
| 20714057 | 79062 | rs34373680 |
| 20714281 | 79286 | rs35051096 |
| 20714508 | 79513 | rs932405 |
| 20714591 | 79596 | rs6926585 |
| 20714635 | 79640 | rs3938395 |
| 20715464 | 80469 | rs11964664 |
| 20715551 | 80556 | rs35964987 |
| 20715663 | 80668 | rs12206413 |
| 20715758 | 80763 | rs35990187 |
| 20715763 | 80768 | rs4991654 |
| 20715910 | 80915 | rs9460532 |
| 20715991 | 80996 | rs13328250 |
| 20716030 | 81035 | rs13328252 |
| 20716194 | 81199 | rs4712517 |
| 20716257 | 81262 | rs4712518 |
| 20717220 | 82225 | rs7758129 |
| 20717475 | 82480 | rs13206462 |
| 20717483 | 82488 | rs13192442 |
| 20717486 | 82491 | rs13206468 |
| 20717492 | 82497 | rs13192445 |
| 20717498 | 82503 | rs13192450 |
| 20717504 | 82509 | rs13206477 |
| 20717510 | 82515 | rs13206483 |
| 20717577 | 82582 | rs12179168 |
| 20717586 | 82591 | rs12180975 |
| 20717611 | 82616 | rs12179172 |
| 20717860 | 82865 | rs12179563 |
| 20718357 | 83362 | rs11355836 |
| 20718696 | 83701 | rs2328527 |
| 20718709 | 83714 | rs11452882 |
| 20718920 | 83925 | rs2876574 |
| 20719905 | 84910 | rs9465831 |
| 20720031 | 85036 | rs34877824 |
| 20720290 | 85295 | rs13212501 |
| 20720647 | 85652 | rs9358352 |
| 20720703 | 85708 | rs9358353 |
| 20720761 | 85766 | rs28756205 |
| 20720889 | 85894 | rs9350265 |
| 20720989 | 85994 | rs7750508 |
| 20721130 | 86135 | rs7771052 |
| 20721141 | 86146 | rs9460533 |
| 20721195 | 86200 | rs13200415 |
| 20721216 | 86221 | rs10550932 |
| 20721312 | 86317 | rs9465832 |
| 20721463 | 86468 | rs9368211 |
| 20721471 | 86476 | rs9350266 |
| 20721507 | 86512 | rs11752592 |
| 20721515 | 86520 | rs9350267 |
| 20721754 | 86759 | rs978988 |
| 20721898 | 86903 | rs978987 |
| 20721906 | 86911 | rs978986 |
| 20722036 | 87041 | rs5874773 |
| 20722196 | 87201 | rs5874774 |
| 20722500 | 87505 | rs7756788 |
| 20722659 | 87664 | rs9348439 |
| 20722661 | 87666 | rs9356739 |
| 20722693 | 87698 | rs9356740 |
| 20722738 | 87743 | rs7760894 |
| 20723021 | 88026 | rs2796913 |
| 20723046 | 88051 | rs2608613 |
| 20723121 | 88126 | rs10456710 |
| 20723139 | 88144 | rs9476286 |
| 20723140 | 88145 | rs9476287 |
| 20723140 | 88145 | rs28368538 |
| 20723141 | 88146 | rs28612622 |
| 20723142 | 88147 | rs9463660 |
| 20723146 | 88151 | rs9463661 |
| 20723162 | 88167 | rs9461022 |
| 20723193 | 88198 | rs9461021 |
| 20723235 | 88240 | rs34980442 |
| 20723239 | 88244 | rs34049080 |
| 20723258 | 88263 | rs35218684 |
| 20723260 | 88265 | rs12175876 |
| 20723270 | 88275 | rs10948323 |
| 20723287 | 88292 | rs34400313 |
| 20723292 | 88297 | rs36081550 |
| 20723304 | 88309 | rs12175878 |
| 20723305 | 88310 | rs34520184 |
| 20723305 | 88310 | rs34756989 |
| 20723322 | 88327 | rs4629736 |
| 20723322 | 88327 | rs9296917 |
| 20723324 | 88329 | rs28562027 |
| 20723333 | 88338 | rs9381823 |
| 20723346 | 88351 | rs34769771 |
| 20723346 | 88351 | rs34774640 |
| 20723346 | 88351 | rs36038896 |
| 20723365 | 88370 | rs13209195 |
| 20723369 | 88374 | rs12213541 |
| 20723369 | 88374 | rs34112320 |
| 20723371 | 88376 | rs34615869 |
| 20723379 | 88384 | rs35949519 |
| 20723381 | 88386 | rs9257498 |
| 20723383 | 88388 | rs34200576 |
| 20723393 | 88398 | rs4960519 |
| 20723396 | 88401 | rs9261905 |
| 20723402 | 88407 | rs9267103 |
| 20723404 | 88409 | rs17367677 |
| 20723416 | 88421 | rs9261906 |
| 20723421 | 88426 | rs9267104 |
| 20723424 | 88429 | rs9267105 |
| 20723434 | 88439 | rs28810763 |
| 20723438 | 88443 | rs12179121 |
| 20723438 | 88443 | rs4714959 |
| 20723439 | 88444 | rs10946636 |
| 20723439 | 88444 | rs28763327 |
| 20723439 | 88444 | rs28847950 |
| 20723439 | 88444 | rs3933247 |
| 20723449 | 88454 | rs28808723 |
| 20723451 | 88456 | rs9767082 |
| 20723452 | 88457 | rs35132675 |
| 20723452 | 88457 | rs35517166 |
| 20723452 | 88457 | rs4714297 |
| 20723456 | 88461 | rs12182737 |
| 20723456 | 88461 | rs36163804 |
| 20723460 | 88465 | rs35790973 |
| 20723464 | 88469 | rs35236694 |
| 20723469 | 88474 | rs35567559 |
| 20723469 | 88474 | rs9267106 |
| 20723471 | 88476 | rs9800557 |
| 20723484 | 88489 | rs12182463 |
| 20723489 | 88494 | rs10948322 |
| 20723489 | 88494 | rs34052284 |
| 20723489 | 88494 | rs9268999 |
| 20723490 | 88495 | rs9258377 |
| 20723495 | 88500 | rs9257499 |
| 20723498 | 88503 | rs9265816 |
| 20723500 | 88505 | rs28771402 |
| 20723501 | 88506 | rs28771401 |
| 20723502 | 88507 | rs12194731 |
| 20723502 | 88507 | rs4451188 |
| 20723502 | 88507 | rs9717323 |
| 20723502 | 88507 | rs9765920 |
| 20723503 | 88508 | rs9265815 |
| 20723504 | 88509 | rs28771400 |
| 20723506 | 88511 | rs12190813 |
| 20723506 | 88511 | rs12215416 |
| 20723507 | 88512 | rs12178527 |
| 20723510 | 88515 | rs35234761 |
| 20723510 | 88515 | rs35887156 |
| 20723512 | 88517 | rs28797321 |
| 20723515 | 88520 | rs28771399 |
| 20723522 | 88527 | rs13207682 |
| 20723522 | 88527 | rs36099432 |
| 20723531 | 88536 | rs28749543 |
| 20723535 | 88540 | rs13196506 |
| 20723535 | 88540 | rs35716308 |
| 20723536 | 88541 | rs28831180 |
| 20723536 | 88541 | rs34938144 |
| 20723537 | 88542 | rs36142967 |
| 20723541 | 88546 | rs35313792 |
| 20723542 | 88547 | rs9260904 |
| 20723543 | 88548 | rs34597832 |
| 20723545 | 88550 | rs9767740 |
| 20723546 | 88551 | rs28771398 |
| 20723550 | 88555 | rs34384951 |
| 20723554 | 88559 | rs12524128 |
| 20723554 | 88559 | rs12665124 |
| 20723554 | 88559 | rs34922643 |
| 20723555 | 88560 | rs9260903 |
| 20723557 | 88562 | rs28771397 |
| 20723557 | 88562 | rs6915279 |
| 20723559 | 88564 | rs9261907 |
| 20723559 | 88564 | rs9766798 |
| 20723559 | 88564 | rs9767242 |
| 20723560 | 88565 | rs6914835 |
| 20723560 | 88565 | rs9260902 |
| 20723560 | 88565 | rs9767101 |
| 20723562 | 88567 | rs9261908 |
| 20723563 | 88568 | rs12207064 |
| 20723563 | 88568 | rs12213193 |
| 20723563 | 88568 | rs35750154 |
| 20723566 | 88571 | rs9260901 |
| 20723570 | 88575 | rs9269000 |
| 20723579 | 88584 | rs12178368 |
| 20723579 | 88584 | rs13197714 |
| 20723579 | 88584 | rs28771396 |
| 20723579 | 88584 | rs34443697 |
| 20723579 | 88584 | rs9267107 |
| 20723582 | 88587 | rs35113301 |
| 20723582 | 88587 | rs3933248 |
| 20723583 | 88588 | rs28819830 |
| 20723586 | 88591 | rs10947899 |
| 20723586 | 88591 | rs9260900 |
| 20723588 | 88593 | rs13204671 |
| 20723588 | 88593 | rs34094007 |
| 20723588 | 88593 | rs34963756 |
| 20723588 | 88593 | rs4304158 |
| 20723589 | 88594 | rs4298351 |
| 20723590 | 88595 | rs12182307 |
| 20723590 | 88595 | rs12201487 |
| 20723590 | 88595 | rs34097573 |
| 20723595 | 88600 | rs13219021 |
| 20723596 | 88601 | rs34456153 |
| 20723596 | 88601 | rs9767597 |
| 20723597 | 88602 | rs9767102 |
| 20723598 | 88603 | rs9269001 |
| 20723601 | 88606 | rs12180097 |
| 20723603 | 88608 | rs12178465 |
| 20723603 | 88608 | rs35128115 |
| 20723607 | 88612 | rs4273681 |
| 20723609 | 88614 | rs12193754 |
| 20723617 | 88622 | rs813814 |
| 20723617 | 88622 | rs9689672 |
| 20723619 | 88624 | rs36173068 |
| 20723623 | 88628 | rs12202172 |
| 20723623 | 88628 | rs28862376 |
| 20723625 | 88630 | rs12178884 |
| 20723625 | 88630 | rs12203117 |
| 20723625 | 88630 | rs34250588 |
| 20723626 | 88631 | rs12182581 |
| 20723632 | 88637 | rs34147797 |
| 20723635 | 88640 | rs9688484 |
| 20723636 | 88641 | rs9269002 |
| 20723636 | 88641 | rs9767733 |
| 20723637 | 88642 | rs10948989 |
| 20723637 | 88642 | rs34732676 |
| 20723637 | 88642 | rs9260899 |
| 20723638 | 88643 | rs35686233 |
| 20723639 | 88644 | rs11753098 |
| 20723639 | 88644 | rs35156647 |
| 20723646 | 88651 | rs35575623 |
| 20723646 | 88651 | rs34719653 |
| 20723648 | 88653 | rs12192046 |
| 20723649 | 88654 | rs11759854 |
| 20723649 | 88654 | rs28771395 |
| 20723649 | 88654 | rs35563402 |
| 20723649 | 88654 | rs36016334 |
| 20723649 | 88654 | rs4555911 |
| 20723653 | 88658 | rs11965757 |
| 20723654 | 88659 | rs10948990 |
| 20723654 | 88659 | rs28808296 |
| 20723654 | 88659 | rs34995142 |
| 20723654 | 88659 | rs809919 |
| 20723657 | 88662 | rs11571978 |
| 20723659 | 88664 | rs12208488 |
| 20723662 | 88667 | rs11751374 |
| 20723663 | 88668 | rs13217613 |
| 20723667 | 88672 | rs12528735 |
| 20723668 | 88673 | rs35160656 |
| 20723668 | 88673 | rs35322569 |
| 20723668 | 88673 | rs9766221 |
| 20723670 | 88675 | rs35120225 |
| 20723670 | 88675 | rs511868 |
| 20723674 | 88679 | rs9269003 |
| 20723675 | 88680 | rs34290316 |
| 20723675 | 88680 | rs35735496 |
| 20723675 | 88680 | rs9689102 |
| 20723676 | 88681 | rs10948991 |
| 20723676 | 88681 | rs9269004 |
| 20723677 | 88682 | rs13220607 |
| 20723677 | 88682 | rs34700647 |
| 20723677 | 88682 | rs9260898 |
| 20723678 | 88683 | rs9260897 |
| 20723684 | 88689 | rs28771394 |
| 20723686 | 88691 | rs12213200 |
| 20723687 | 88692 | rs9717987 |
| 20723688 | 88693 | rs28771393 |
| 20723688 | 88693 | rs9717716 |
| 20723689 | 88694 | rs28771392 |
| 20723690 | 88695 | rs11758009 |
| 20723690 | 88695 | rs34159662 |
| 20723690 | 88695 | rs34683172 |
| 20723690 | 88695 | rs9717331 |
| 20723691 | 88696 | rs9717853 |
| 20723692 | 88697 | rs9765875 |
| 20723696 | 88701 | rs12178974 |
| 20723696 | 88701 | rs36003577 |
| 20723698 | 88703 | rs9767747 |
| 20723700 | 88705 | rs28771391 |
| 20723704 | 88709 | rs13216352 |
| 20723707 | 88712 | rs12200762 |
| 20723707 | 88712 | rs12206373 |
| 20723707 | 88712 | rs34570202 |
| 20723707 | 88712 | rs36197940 |
| 20723707 | 88712 | rs9265814 |
| 20723714 | 88719 | rs34131282 |
| 20723717 | 88722 | rs12175478 |
| 20723720 | 88725 | rs28772692 |
| 20723722 | 88727 | rs35516674 |
| 20723722 | 88727 | rs35704013 |
| 20723727 | 88732 | rs34691406 |
| 20723728 | 88733 | rs28771390 |
| 20723728 | 88733 | rs4374863 |
| 20723730 | 88735 | rs34826149 |
| 20723734 | 88739 | rs12207894 |
| 20723734 | 88739 | rs12662476 |
| 20723736 | 88741 | rs9260896 |
| 20723739 | 88744 | rs28771389 |
| 20723740 | 88745 | rs28771388 |
| 20723741 | 88746 | rs9382592 |
| 20723745 | 88750 | rs12173375 |
| 20723745 | 88750 | rs9268072 |
| 20723745 | 88750 | rs9382110 |
| 20723746 | 88751 | rs4715211 |
| 20723747 | 88752 | rs34128950 |
| 20723747 | 88752 | rs35961188 |
| 20723747 | 88752 | rs4620119 |
| 20723749 | 88754 | rs9767236 |
| 20723752 | 88757 | rs34717143 |
| 20723755 | 88760 | rs13201202 |
| 20723756 | 88761 | rs13201503 |
| 20723762 | 88767 | rs13197088 |
| 20723762 | 88767 | rs35347849 |
| 20723766 | 88771 | rs34663083 |
| 20723766 | 88771 | rs35650828 |
| 20723767 | 88772 | rs13199241 |
| 20723767 | 88772 | rs34205031 |
| 20723768 | 88773 | rs28749541 |
| 20723768 | 88773 | rs34469031 |
| 20723768 | 88773 | rs9279137 |
| 20723769 | 88774 | rs9260895 |
| 20723770 | 88775 | rs12212483 |
| 20723770 | 88775 | rs35446958 |
| 20723775 | 88780 | rs28380829 |
| 20723777 | 88782 | rs12525384 |
| 20723777 | 88782 | rs34576984 |
| 20723782 | 88787 | rs283541 |
| 20723785 | 88790 | rs28380828 |
| 20723788 | 88793 | rs10948698 |
| 20723790 | 88795 | rs9265813 |
| 20723791 | 88796 | rs9689173 |
| 20723792 | 88797 | rs28380827 |
| 20723795 | 88800 | rs35399169 |
| 20723799 | 88804 | rs9260894 |
| 20723800 | 88805 | rs12173388 |
| 20723800 | 88805 | rs9269005 |
| 20723802 | 88807 | rs28359816 |
| 20723803 | 88808 | rs28380826 |
| 20723807 | 88812 | rs280297 |
| 20723807 | 88812 | rs34507582 |
| 20723807 | 88812 | rs9261623 |
| 20723810 | 88815 | rs12174621 |
| 20723813 | 88818 | rs28380825 |
| 20723815 | 88820 | rs35197377 |
| 20723816 | 88821 | rs17362870 |
| 20723816 | 88821 | rs34562190 |
| 20723816 | 88821 | rs35071522 |
| 20723816 | 88821 | rs35179751 |
| 20723816 | 88821 | rs4458721 |
| 20723817 | 88822 | rs12180385 |
| 20723817 | 88822 | rs12206581 |
| 20723817 | 88822 | rs12333308 |
| 20723817 | 88822 | rs9269006 |
| 20723821 | 88826 | rs9688475 |
| 20723829 | 88834 | rs9269007 |
| 20723832 | 88837 | rs9269008 |
| 20723832 | 88837 | rs9269009 |
| 20723834 | 88839 | rs35899754 |
| 20723836 | 88841 | rs13211190 |
| 20723837 | 88842 | rs12216274 |
| 20723838 | 88843 | rs12191544 |
| 20723838 | 88843 | rs4337934 |
| 20723841 | 88846 | rs9279295 |
| 20723842 | 88847 | rs12178577 |
| 20723849 | 88854 | rs12215604 |
| 20723853 | 88858 | rs9395360 |
| 20723854 | 88859 | rs28749540 |
| 20723855 | 88860 | rs28895226 |
| 20723855 | 88860 | rs9260893 |
| 20723861 | 88866 | rs4365925 |
| 20723864 | 88869 | rs9261912 |
| 20723865 | 88870 | rs28895227 |
| 20723870 | 88875 | rs9261913 |
| 20723873 | 88878 | rs12183502 |
| 20723873 | 88878 | rs34332895 |
| 20723873 | 88878 | rs9472692 |
| 20723876 | 88881 | rs35640475 |
| 20723884 | 88889 | rs9269010 |
| 20723888 | 88893 | rs12192337 |
| 20723888 | 88893 | rs35349786 |
| 20723891 | 88896 | rs34978372 |
| 20723893 | 88898 | rs280296 |
| 20723894 | 88899 | rs11755576 |
| 20723903 | 88908 | rs28803616 |
| 20723903 | 88908 | rs35553517 |
| 20723904 | 88909 | rs4358654 |
| 20723910 | 88915 | rs9260892 |
| 20723914 | 88919 | rs13196941 |
| 20723914 | 88919 | rs9717238 |
| 20723915 | 88920 | rs12175553 |
| 20723915 | 88920 | rs12191408 |
| 20723915 | 88920 | rs4460210 |
| 20723915 | 88920 | rs9260891 |
| 20723918 | 88923 | rs9395361 |
| 20723920 | 88925 | rs9766917 |
| 20723926 | 88931 | rs35073779 |
| 20723931 | 88936 | rs9765884 |
| 20723931 | 88936 | rs9767229 |
| 20723932 | 88937 | rs35247846 |
| 20723932 | 88937 | rs9717328 |
| 20723936 | 88941 | rs28805674 |
| 20723936 | 88941 | rs9260890 |
| 20723938 | 88943 | rs34926348 |
| 20723938 | 88943 | rs9717233 |
| 20723945 | 88950 | rs35869128 |
| 20723946 | 88951 | rs12175941 |
| 20723951 | 88956 | rs9260889 |
| 20723952 | 88957 | rs9766686 |
| 20723956 | 88961 | rs10046203 |
| 20723957 | 88962 | rs9260888 |
| 20723958 | 88963 | rs12180540 |
| 20723961 | 88966 | rs9766115 |
| 20723968 | 88973 | rs6912019 |
| 20723969 | 88974 | rs9767458 |
| 20723976 | 88981 | rs13202161 |
| 20723989 | 88994 | rs13218048 |
| 20724000 | 89005 | rs13218040 |
| 20724001 | 89006 | rs13206557 |
| 20724002 | 89007 | rs13202152 |
| 20724013 | 89018 | rs12210049 |
| 20724013 | 89018 | rs34552032 |
| 20724018 | 89023 | rs28890881 |
| 20724018 | 89023 | rs34478537 |
| 20724025 | 89030 | rs35191657 |
| 20724038 | 89043 | rs34450517 |
| 20724043 | 89048 | rs9689655 |
| 20724064 | 89069 | rs12180172 |
| 20724068 | 89073 | rs28865015 |
| 20724071 | 89076 | rs9717839 |
| 20724072 | 89077 | rs9717836 |
| 20724074 | 89079 | rs9885593 |
| 20724082 | 89087 | rs28887572 |
| 20724083 | 89088 | rs13216113 |
| 20724083 | 89088 | rs35254115 |
| 20724084 | 89089 | rs10949190 |
| 20724085 | 89090 | rs6923503 |
| 20724087 | 89092 | rs12214411 |
| 20724091 | 89096 | rs28747986 |
| 20724096 | 89101 | rs1087363 |
| 20724096 | 89101 | rs1091092 |
| 20724104 | 89109 | rs12180759 |
| 20724107 | 89112 | rs11758052 |
| 20724112 | 89117 | rs9261321 |
| 20724113 | 89118 | rs28861738 |
| 20724113 | 89118 | rs36109104 |
| 20724123 | 89128 | rs13208115 |
| 20724129 | 89134 | rs9472693 |
| 20724130 | 89135 | rs12208570 |
| 20724130 | 89135 | rs28832660 |
| 20724131 | 89136 | rs13200482 |
| 20724131 | 89136 | rs9260886 |
| 20724131 | 89136 | rs9472694 |
| 20724159 | 89164 | rs9260885 |
| 20724172 | 89177 | rs280295 |
| 20724172 | 89177 | rs28749538 |
| 20724174 | 89179 | rs13201041 |
| 20724184 | 89189 | rs1087362 |
| 20724187 | 89192 | rs12183850 |
| 20724190 | 89195 | rs12202552 |
| 20724208 | 89213 | rs9260884 |
| 20724210 | 89215 | rs9474341 |
| 20724211 | 89216 | rs9260883 |
| 20724222 | 89227 | rs34669820 |
| 20724225 | 89230 | rs12189886 |
| 20724234 | 89239 | rs12182114 |
| 20724266 | 89271 | rs9688643 |
| 20724272 | 89277 | rs12195237 |
| 20724281 | 89286 | rs35293595 |
| 20724281 | 89286 | rs9381428 |
| 20724306 | 89311 | rs34665644 |
| 20724309 | 89314 | rs12189599 |
| 20724311 | 89316 | rs12208503 |
| 20724312 | 89317 | rs9800791 |
| 20724330 | 89335 | rs12173681 |
| 20724337 | 89342 | rs12182094 |
| 20724343 | 89348 | rs12182119 |
| 20724352 | 89357 | rs12182102 |
| 20724392 | 89397 | rs12174506 |
| 20724393 | 89398 | rs9767809 |
| 20724394 | 89399 | rs12173703 |
| 20724401 | 89406 | rs12202889 |
| 20724435 | 89440 | rs28840538 |
| 20724466 | 89471 | rs9473983 |
| 20724467 | 89472 | rs34220946 |
| 20724487 | 89492 | rs9261322 |
| 20724491 | 89496 | rs9261323 |
| 20724517 | 89522 | rs526092 |
| 20724564 | 89569 | rs9473982 |
| 20724566 | 89571 | rs34307764 |
| 20724626 | 89631 | rs34490559 |
| 20724665 | 89670 | rs4449621 |
| 20724685 | 89690 | rs4714818 |
| 20724698 | 89703 | rs4714817 |
| 20724722 | 89727 | rs682384 |
| 20724738 | 89743 | rs682051 |
| 20724753 | 89758 | rs12530056 |
| 20724756 | 89761 | rs35086683 |
| 20724888 | 89893 | rs12528468 |
| 20725092 | 90097 | rs10650195 |
| 20725092 | 90097 | rs35956126 |
| 20725109 | 90114 | rs6937578 |
| 20725159 | 90164 | rs12530107 |
| 20725173 | 90178 | rs720448 |
| 20725176 | 90181 | rs9368212 |
| 20725250 | 90255 | rs35481531 |
| 20725253 | 90258 | rs720449 |
| 20725262 | 90267 | rs10650196 |
| 20725495 | 90500 | rs2064 |
| 20725499 | 90504 | rs2065 |
| 20725638 | 90643 | rs9368213 |
| 20725732 | 90737 | rs41455744 |
| 20726077 | 91082 | rs34960654 |
| 20726154 | 91159 | rs6900954 |
| 20726168 | 91173 | rs6456359 |
| 20726176 | 91181 | rs7739405 |
| 20726601 | 91606 | rs7760508 |
| 20726684 | 91689 | rs10456007 |
| 20726987 | 91992 | rs9460534 |
| 20727168 | 92173 | rs11966749 |
| 20727353 | 92358 | rs9358354 |
| 20727809 | 92814 | rs9368214 |
| 20727982 | 92987 | rs9350268 |
| 20728095 | 93100 | rs2069013 |
| 20728160 | 93165 | rs2069014 |
| 20728290 | 93295 | rs2069015 |
| 20728292 | 93297 | rs11967475 |
| 20729096 | 94101 | rs10214549 |
| 20729217 | 94222 | rs2223621 |
| 20729281 | 94286 | rs9465835 |
| 20729984 | 94989 | rs35404829 |
| 20729995 | 95000 | rs10687080 |
| 20730233 | 95238 | rs6915936 |
| 20730331 | 95336 | rs9295472 |
| 20730732 | 95737 | rs1569660 |
| 20730929 | 95934 | rs7455009 |
| 20730945 | 95950 | rs1569659 |
| 20730946 | 95951 | rs5874775 |
| 20730948 | 95953 | rs10601252 |
| 20730983 | 95988 | rs1569658 |
| 20731030 | 96035 | rs34142400 |
| 20731063 | 96068 | rs16883996 |
| 20731181 | 96186 | rs35073110 |
| 20731184 | 96189 | rs5028948 |
| 20731263 | 96268 | rs34201758 |
| 20731371 | 96376 | rs6456360 |
| 20731373 | 96378 | rs6456361 |
| 20731380 | 96385 | rs6456362 |
| 20731584 | 96589 | rs6922571 |
| 20731925 | 96930 | rs35145358 |
| 20731950 | 96955 | rs9465836 |
| 20732013 | 97018 | rs7763304 |
| 20732158 | 97163 | rs9465837 |
| 20732218 | 97223 | rs7743314 |
| 20732337 | 97342 | rs714831 |
| 20732361 | 97366 | rs714830 |
| 20732484 | 97489 | rs7743789 |
| 20732584 | 97589 | rs5874776 |
| 20732589 | 97594 | rs5874777 |
| 20732965 | 97970 | rs16884003 |
| 20733079 | 98084 | rs9356741 |
| 20733080 | 98085 | rs9366358 |
| 20733246 | 98251 | rs9356742 |
| 20733430 | 98435 | rs11756987 |
| 20733470 | 98475 | rs9465838 |
| 20733613 | 98618 | rs2206579 |
| 20733920 | 98925 | rs35111339 |
| 20734361 | 99366 | rs6917583 |
| 20734388 | 99393 | rs6917599 |
| 20734630 | 99635 | rs13437429 |
| 20735418 | 100423 | rs34307011 |
| 20735420 | 100425 | rs4515379 |
| 20735756 | 100761 | rs2223620 |
| 20735870 | 100875 | rs9465839 |
| 20735993 | 100998 | rs12664972 |
| 20736790 | 101795 | rs28402356 |
| 20736798 | 101803 | rs6934727 |
| 20736873 | 101878 | rs35493429 |
| 20736881 | 101886 | rs11369825 |
| 20737261 | 102266 | rs4523079 |
| 20737470 | 102475 | rs7771213 |
| 20737568 | 102573 | rs9465840 |
| 20737687 | 102692 | rs9465841 |
| 20737767 | 102772 | rs9465842 |
| 20737837 | 102842 | rs9460535 |
| 20737992 | 102997 | rs34835908 |
| 20738060 | 103065 | rs9465843 |
| 20738139 | 103144 | rs13220465 |
| 20738159 | 103164 | rs13220352 |
| 20738321 | 103326 | rs4710937 |
| 20738375 | 103380 | rs9460536 |
| 20738376 | 103381 | rs13190734 |
| 20738451 | 103456 | rs9465844 |
| 20738712 | 103717 | rs35976895 |
| 20738713 | 103718 | rs11327958 |
| 20738932 | 103937 | rs13194407 |
| 20738990 | 103995 | rs10484633 |
| 20739524 | 104529 | rs2328528 |
| 20739789 | 104794 | rs35958155 |
| 20739809 | 104814 | rs4421185 |
| 20739932 | 104937 | rs2328529 |
| 20740089 | 105094 | rs9460537 |
| 20740745 | 105750 | rs17224527 |
| 20740886 | 105891 | rs34166991 |
| 20741024 | 106029 | rs17823073 |
| 20741276 | 106281 | rs12183074 |
| 20741316 | 106321 | rs9465845 |
| 20741844 | 106849 | rs35148963 |
| 20741886 | 106891 | rs7768642 |
| 20742320 | 107325 | rs9465846 |
| 20742407 | 107412 | rs9465847 |
| 20742551 | 107556 | rs17823127 |
| 20742594 | 107599 | rs16884021 |
| 20742630 | 107635 | rs4533976 |
| 20742865 | 107870 | rs7755830 |
| 20743005 | 108010 | rs7756031 |
| 20743139 | 108144 | rs35650451 |
| 20743192 | 108197 | rs10561117 |
| 20743241 | 108246 | rs6940200 |
| 20743799 | 108804 | rs9465848 |
| 20743808 | 108813 | rs34351919 |
| 20745083 | 110088 | rs4712519 |
| 20745285 | 110290 | rs9368215 |
| 20745566 | 110571 | rs12206285 |
| 20745853 | 110858 | rs34049994 |
| 20745988 | 110993 | rs7751957 |
| 20746702 | 111707 | rs9465849 |
| 20746857 | 111862 | rs7341291 |
| 20746957 | 111962 | rs6921014 |
| 20747388 | 112393 | rs9465850 |
| 20747583 | 112588 | rs7758612 |
| 20747681 | 112686 | rs35602526 |
| 20748295 | 113300 | rs9465851 |
| 20748399 | 113404 | rs34257578 |
| 20748403 | 113408 | rs11339738 |
| 20748516 | 113521 | rs9460538 |
| 20748850 | 113855 | rs4712520 |
| 20748883 | 113888 | rs4710938 |
| 20749084 | 114089 | rs35889049 |
| 20749315 | 114320 | rs9348440 |
| 20749879 | 114884 | rs9465852 |
| 20750054 | 115059 | rs12196009 |
| 20750306 | 115311 | rs11968248 |
| 20750353 | 115358 | rs34797179 |
| 20750764 | 115769 | rs6925328 |
| 20750913 | 115918 | rs36073053 |
| 20751137 | 116142 | rs35462488 |
| 20751140 | 116145 | rs36224625 |
| 20751150 | 116155 | rs3060659 |
| 20751153 | 116158 | rs5874778 |
| 20751155 | 116160 | rs11267861 |
| 20751201 | 116206 | rs4235999 |
| 20751230 | 116235 | rs16884038 |
| 20751706 | 116711 | rs2328530 |
| 20751731 | 116736 | rs2328531 |
| 20751750 | 116755 | rs28360636 |
| 20752162 | 117167 | rs6932676 |
| 20752183 | 117188 | rs9460539 |
| 20752303 | 117308 | rs6932876 |
| 20752346 | 117351 | rs34929755 |
| 20752359 | 117364 | rs28733367 |
| 20752360 | 117365 | rs11348111 |
| 20752473 | 117478 | rs6933219 |
| 20752702 | 117707 | rs6933165 |
| 20752872 | 117877 | rs35255583 |
| 20752901 | 117906 | rs34332316 |
| 20752923 | 117928 | rs4710939 |
| 20753486 | 118491 | rs11970417 |
| 20753659 | 118664 | rs11963217 |
| 20753670 | 118675 | rs11965473 |
| 20753833 | 118838 | rs2876575 |
| 20754049 | 119054 | rs7739974 |
| 20754976 | 119981 | rs7745175 |
| 20755173 | 120178 | rs7765784 |
| 20755178 | 120183 | rs6907731 |
| 20755250 | 120255 | rs35057896 |
| 20755313 | 120318 | rs7746072 |
| 20755639 | 120644 | rs10484632 |
| 20755770 | 120775 | rs35444529 |
| 20755849 | 120854 | rs17823571 |
| 20755941 | 120946 | rs11965062 |
| 20755962 | 120967 | rs6936199 |
| 20755965 | 120970 | rs6913126 |
| 20756178 | 121183 | rs6913509 |
| 20756613 | 121618 | rs34638218 |
| 20756673 | 121678 | rs35746011 |
| 20756741 | 121746 | rs9460540 |
| 20757090 | 122095 | rs36045545 |
| 20757129 | 122134 | rs35392790 |
| 20757233 | 122238 | rs6456364 |
| 20757260 | 122265 | rs2179553 |
| 20757513 | 122518 | rs9350269 |
| 20757531 | 122536 | rs9465854 |
| 20757787 | 122792 | rs2179552 |
| 20757936 | 122941 | rs6925233 |
| 20758033 | 123038 | rs2328532 |
| 20758248 | 123253 | rs7743970 |
| 20758317 | 123322 | rs13209457 |
| 20758318 | 123323 | rs34641285 |
| 20758344 | 123349 | rs13209538 |
| 20758387 | 123392 | rs2876576 |
| 20758479 | 123484 | rs13209572 |
| 20758653 | 123658 | rs28783153 |
| 20758712 | 123717 | rs9969037 |
| 20758800 | 123805 | rs7766844 |
| 20758969 | 123974 | rs7767133 |
| 20759291 | 124296 | rs7749464 |
| 20760100 | 125105 | rs2050225 |
| 20760696 | 125701 | rs9295474 |
| 20760744 | 125749 | rs9295475 |
| 20761529 | 126534 | rs2328545 |
| 20761548 | 126553 | rs28846771 |
| 20761779 | 126784 | rs2876582 |
| 20761899 | 126904 | rs10223446 |
| 20762094 | 127099 | rs13219723 |
| 20762095 | 127100 | rs13203489 |
| 20762154 | 127159 | rs13203583 |
| 20762172 | 127177 | rs13203887 |
| 20762279 | 127284 | rs6456366 |
| 20762876 | 127881 | rs9358355 |
| 20763089 | 128094 | rs9368216 |
| 20763375 | 128380 | rs9465855 |
| 20763384 | 128389 | rs9465856 |
| 20763463 | 128468 | rs16884070 |
| 20763482 | 128487 | rs16884072 |
| 20763647 | 128652 | rs13208604 |
| 20764169 | 129174 | rs9465857 |
| 20764307 | 129312 | rs9368217 |
| 20764559 | 129564 | rs9460541 |
| 20764746 | 129751 | rs9460542 |
| 20764765 | 129770 | rs11969955 |
| 20764779 | 129784 | rs4712522 |
| 20764924 | 129929 | rs16884074 |
| 20765172 | 130177 | rs34489684 |
| 20765324 | 130329 | rs2328546 |
| 20765543 | 130548 | rs4712523 |
| 20765844 | 130849 | rs4712524 |
| 20765898 | 130903 | rs35397753 |
| 20765991 | 130996 | rs4710940 |
| 20766197 | 131202 | rs13190727 |
| 20766215 | 131220 | rs35136485 |
| 20766311 | 131316 | rs35260725 |
| 20766335 | 131340 | rs35939620 |
| 20766566 | 131571 | rs17823996 |
| 20766713 | 131718 | rs16884082 |
| 20767438 | 132443 | rs6906327 |
| 20767566 | 132571 | rs6456367 |
| 20767785 | 132790 | rs6456368 |
| 20768202 | 133207 | rs7749083 |
| 20768344 | 133349 | rs6456369 |
| 20768669 | 133674 | rs10946396 |
| 20768672 | 133677 | rs10946397 |
| 20768710 | 133715 | rs11759505 |
| 20769000 | 134005 | rs13203361 |
| 20769013 | 134018 | rs10946398 |
| 20769122 | 134127 | rs7774594 |
| 20769229 | 134234 | rs7754840 |
| 20769249 | 134254 | rs9460543 |
| 20769508 | 134513 | rs9460544 |
| 20769529 | 134534 | rs9460545 |
| 20769711 | 134716 | rs2206740 |
| 20769806 | 134811 | rs5874779 |
| 20769807 | 134812 | rs33970890 |
| 20769815 | 134820 | rs5874780 |
| 20769816 | 134821 | rs35014292 |
| 20769816 | 134821 | rs35363501 |
| 20770092 | 135097 | rs6456370 |
| 20770102 | 135107 | rs979614 |
| 20770196 | 135201 | rs35456723 |
| 20770571 | 135576 | rs9368218 |
| 20770945 | 135950 | rs4712525 |
| 20771014 | 136019 | rs4712526 |
| 20771314 | 136319 | rs4712527 |
| 20771442 | 136447 | rs35191644 |
| 20771442 | 136447 | rs34470647 |
| 20771611 | 136616 | rs9460546 |
| 20771938 | 136943 | rs9465859 |
| 20772079 | 137084 | rs9465860 |
| 20772291 | 137296 | rs736425 |
| 20772508 | 137513 | rs3060776 |
| 20772509 | 137514 | rs34941928 |
| 20772512 | 137517 | rs5874781 |
| 20772761 | 137766 | rs35778487 |
| 20773060 | 138065 | rs742642 |
| 20773305 | 138310 | rs35248697 |
| 20773436 | 138441 | rs11967127 |
| 20773528 | 138533 | rs7748382 |
| 20773547 | 138552 | rs9688549 |
| 20773548 | 138553 | rs9689351 |
| 20773570 | 138575 | rs28665000 |
| 20773886 | 138891 | rs7752236 |
| 20773925 | 138930 | rs7772603 |
| 20774001 | 139006 | rs7752780 |
| 20774034 | 139039 | rs7752906 |
| 20774160 | 139165 | rs34184260 |
| 20774223 | 139228 | rs2206739 |
| 20774225 | 139230 | rs2206738 |
| 20774250 | 139255 | rs2206737 |
| 20774436 | 139441 | rs11970425 |
| 20774484 | 139489 | rs36034806 |
| 20774899 | 139904 | rs35042364 |
| 20775218 | 140223 | rs35540121 |
| 20775361 | 140366 | rs9358356 |
| 20775667 | 140672 | rs9356743 |
| 20775778 | 140783 | rs9350270 |
| 20776366 | 141371 | rs34929853 |
| 20778035 | 143040 | rs34971765 |
| 20778443 | 143448 | rs11970596 |
| 20779261 | 144266 | rs12527373 |
| 20779367 | 144372 | rs35916847 |
| 20780262 | 145267 | rs11968224 |
| 20780271 | 145276 | rs11968225 |
| 20780276 | 145281 | rs9465861 |
| 20780296 | 145301 | rs11968264 |
| 20780406 | 145411 | rs12189849 |
| 20780413 | 145418 | rs12209627 |
| 20780432 | 145437 | rs12189895 |
| 20780855 | 145860 | rs11968848 |
| 20781135 | 146140 | rs11963945 |
| 20781601 | 146606 | rs35677128 |
| 20781859 | 146864 | rs7451008 |
| 20782670 | 147675 | rs9368219 |
| 20782790 | 147795 | rs1012636 |
| 20782945 | 147950 | rs13217846 |
| 20783274 | 148279 | rs1012635 |
| 20783700 | 148705 | rs35665197 |
| 20783771 | 148776 | rs35261542 |
| 20783828 | 148833 | rs28823314 |
| 20783899 | 148904 | rs28890810 |
| 20784051 | 149056 | rs28871991 |
| 20784393 | 149398 | rs34499031 |
| 20784650 | 149655 | rs13208763 |
| 20784747 | 149752 | rs28719685 |
| 20784789 | 149794 | rs28856096 |
| 20785042 | 150047 | rs11961863 |
| 20785211 | 150216 | rs17824302 |
| 20785289 | 150294 | rs12660618 |
| 20786302 | 151307 | rs11371206 |
| 20786303 | 151308 | rs34152621 |
| 20786409 | 151414 | rs4712528 |
| 20786463 | 151468 | rs13217082 |
| 20786470 | 151475 | rs13217085 |
| 20786481 | 151486 | rs13217090 |
| 20786483 | 151488 | rs13217091 |
| 20786523 | 151528 | rs13200946 |
| 20786772 | 151777 | rs11968032 |
| 20786954 | 151959 | rs9465863 |
| 20787289 | 152294 | rs1569699 |
| 20787386 | 152391 | rs34168173 |
| 20787688 | 152693 | rs7756992 |
| 20788045 | 153050 | rs35312717 |
| 20788657 | 153662 | rs9348441 |
| 20788843 | 153848 | rs9368220 |
| 20788941 | 153946 | rs6931254 |
| 20789327 | 154332 | rs6911742 |
| 20790601 | 155606 | rs35612982 |
| 20791039 | 156044 | rs35816514 |
| 20791123 | 156128 | rs34612860 |
| 20791143 | 156148 | rs9350271 |
| 20791162 | 156167 | rs35657899 |
| 20791179 | 156184 | rs11364854 |
| 20791249 | 156254 | rs9460547 |
| 20791646 | 156651 | rs16884103 |
| 20791961 | 156966 | rs2206736 |
| 20793465 | 158470 | rs9356744 |
| 20794295 | 159300 | rs34987372 |
| 20794427 | 159432 | rs36005020 |
| 20794552 | 159557 | rs7766070 |
| 20794975 | 159980 | rs9368222 |
| 20795290 | 160295 | rs35566695 |
| 20795781 | 160786 | rs10440832 |
| 20796100 | 161105 | rs10440833 |
| 20796237 | 161242 | rs35747076 |
| 20796578 | 161583 | rs6900217 |
| 20797104 | 162109 | rs34433496 |
| 20797924 | 162929 | rs7748720 |
| 20797928 | 162933 | rs34175709 |
| 20798290 | 163295 | rs6911357 |
| 20800493 | 165498 | rs12200791 |
| 20800955 | 165960 | rs5874782 |
| 20800957 | 165962 | rs36119385 |
| 20801341 | 166346 | rs13219682 |
| 20802207 | 167212 | rs4710941 |
| 20802270 | 167275 | rs4620109 |
| 20802272 | 167277 | rs28459626 |
| 20802273 | 167278 | rs4712529 |
| 20802294 | 167299 | rs10577753 |
| 20802504 | 167509 | rs2223683 |
| 20802573 | 167578 | rs2206735 |
| 20802863 | 167868 | rs2206734 |
| 20802910 | 167915 | rs34530846 |
| 20803458 | 168463 | rs16884131 |
| 20804127 | 169132 | rs10806921 |
| 20805104 | 170109 | rs16884133 |
| 20805571 | 170576 | rs17824500 |
| 20805652 | 170657 | rs10946401 |
| 20806114 | 171119 | rs16884135 |
| 20806582 | 171587 | rs35711395 |
| 20807220 | 172225 | rs11969783 |
| 20807364 | 172369 | rs16884137 |
| 20808600 | 173605 | rs11970626 |
| 20809092 | 174097 | rs12190713 |
| 20809106 | 174111 | rs11398905 |
| 20809415 | 174420 | rs11961445 |
| 20809470 | 174475 | rs35982077 |
| 20809486 | 174491 | rs11305935 |
| 20810952 | 175957 | rs9356745 |
| 20811700 | 176705 | rs35043644 |
| 20811842 | 176847 | rs16884140 |
| 20811931 | 176936 | rs6931514 |
| 20812147 | 177152 | rs35443650 |
| 20813281 | 178286 | rs34671712 |
| 20813569 | 178574 | rs11753081 |
| 20814081 | 179086 | rs7739516 |
| 20814209 | 179214 | rs6901559 |
| 20815176 | 180181 | rs13196379 |
| 20815177 | 180182 | rs13212234 |
| 20816204 | 181209 | rs10536170 |
| 20817155 | 182160 | rs9465869 |
| 20817688 | 182693 | rs36070002 |
| 20818288 | 183293 | rs17226450 |
| 20818905 | 183910 | rs1073247 |
| 20819131 | 184136 | rs9465870 |
| 20819386 | 184391 | rs17226492 |
| 20819433 | 184438 | rs13213613 |
| 20819567 | 184572 | rs16884146 |
| 20819958 | 184963 | rs2206733 |
| 20820440 | 185445 | rs3749925 |
| 20821121 | 186126 | rs9460548 |
| 20821619 | 186624 | rs9460549 |
| 20821685 | 186690 | rs1040558 |
| 20821893 | 186898 | rs4712530 |
| 20822083 | 187088 | rs35629277 |
| 20822362 | 187367 | rs7451928 |
| 20822445 | 187450 | rs6456371 |
| 20822589 | 187594 | rs13220116 |
| 20822823 | 187828 | rs2206732 |
| 20823169 | 188174 | rs2179633 |
| 20823483 | 188488 | rs11963770 |
| 20823805 | 188810 | rs10946402 |
| 20823840 | 188845 | rs4712531 |
| 20824098 | 189103 | rs35738288 |
| 20824232 | 189237 | rs9295478 |
| 20824549 | 189554 | rs2328547 |
| 20824763 | 189768 | rs3060781 |
| 20824764 | 189769 | rs34686252 |
| 20824856 | 189861 | rs13215905 |
| 20824884 | 189889 | rs9368223 |
| 20824937 | 189942 | rs2328548 |
| 20825025 | 190030 | rs11427712 |
| 20825074 | 190079 | rs6935599 |
| 20825100 | 190105 | rs13216165 |
| 20825234 | 190239 | rs9465871 |
| 20825383 | 190388 | rs10946403 |
| 20826219 | 191224 | rs2328549 |
| 20826449 | 191454 | rs17226774 |
| 20827124 | 192129 | rs9358357 |
| 20827211 | 192216 | rs9368224 |
| 20827321 | 192326 | rs11756271 |
| 20827372 | 192377 | rs9358358 |
| 20827540 | 192545 | rs9460550 |
| 20827858 | 192863 | rs12110493 |
| 20827866 | 192871 | rs12193125 |
| 20828258 | 193263 | rs9356746 |
| 20828797 | 193802 | rs9350272 |
| 20829322 | 194327 | rs13219444 |
| 20829342 | 194347 | rs12111216 |
| 20829562 | 194567 | rs9350273 |
| 20829700 | 194705 | rs9368225 |
| 20830399 | 195404 | rs17825025 |
| 20831036 | 196041 | rs9368226 |
| 20832213 | 197218 | rs6903175 |
| 20832229 | 197234 | rs6903744 |
| 20832537 | 197542 | rs12111351 |
| 20832754 | 197759 | rs4712536 |
| 20832986 | 197991 | rs9356747 |
| 20833076 | 198081 | rs9356748 |
| 20833219 | 198224 | rs7767391 |
| 20833402 | 198407 | rs7747752 |
| 20833511 | 198516 | rs9350274 |
| 20833853 | 198858 | rs34170041 |
| 20833919 | 198924 | rs6915155 |
| 20834014 | 199019 | rs6914868 |
| 20834472 | 199477 | rs4538697 |
| 20835549 | 200554 | rs4712537 |
| 20836048 | 201053 | rs34097377 |
| 20836492 | 201497 | rs6928012 |
| 20836710 | 201715 | rs6908425 |

TABLE 11
SNPs within LD block C10 (SEQ ID NO: 2) between positions
94,192,885 and 94,490,091 bp on Chromosome 10 in NCBI
Build 35 and NCBI Build 36

| | Position in | |
|---|---|---|
| Position in | SEQ ID | |
| Build 35/36 | NO: 2 | Marker ID |
| 94192885 | 1 | rs2798253 |
| 94193597 | 713 | rs36087110 |
| 94193803 | 919 | rs35771118 |
| 94193950 | 1066 | rs12359552 |
| 94193961 | 1077 | rs11186999 |
| 94194166 | 1282 | rs7916460 |
| 94194775 | 1891 | rs10882065 |
| 94195841 | 2957 | rs11187000 |
| 94196162 | 3278 | rs4933231 |
| 94196306 | 3422 | rs11187001 |
| 94196353 | 3469 | rs4933725 |
| 94196465 | 3581 | rs11187002 |
| 94196477 | 3593 | rs4933726 |
| 94196509 | 3625 | rs4933232 |
| 94196716 | 3832 | rs11187003 |
| 94196844 | 3960 | rs34115369 |
| 94197028 | 4144 | rs10786047 |
| 94197152 | 4268 | rs11814521 |
| 94197347 | 4463 | rs11814555 |
| 94198457 | 5573 | rs7476275 |
| 94198727 | 5843 | rs3118967 |
| 94199011 | 6127 | rs11187004 |
| 94199856 | 6972 | rs7910977 |
| 94199919 | 7035 | rs6583813 |
| 94199932 | 7048 | rs511985 |
| 94200269 | 7385 | rs7911558 |
| 94200789 | 7905 | rs12415807 |
| 94201174 | 8290 | rs35125831 |
| 94201284 | 8400 | rs2251101 |
| 94201876 | 8992 | rs7896688 |
| 94202516 | 9632 | rs5786996 |
| 94202722 | 9838 | rs913648 |
| 94203071 | 10187 | rs5786997 |
| 94203072 | 10188 | rs35771235 |
| 94203255 | 10371 | rs34872659 |
| 94203768 | 10884 | rs34266748 |
| 94204339 | 11455 | rs4646958 |
| 94204560 | 11676 | rs11187007 |
| 94205437 | 12553 | rs11459510 |
| 94205449 | 12565 | rs35832015 |
| 94206153 | 13269 | rs12356364 |
| 94206407 | 13523 | rs11593933 |
| 94206490 | 13606 | rs3781241 |
| 94206524 | 13640 | rs3781240 |
| 94206594 | 13710 | rs10562725 |
| 94206599 | 13715 | rs10617641 |
| 94206609 | 13725 | rs28641489 |
| 94207018 | 14134 | rs11187009 |
| 94207224 | 14340 | rs36119168 |
| 94207391 | 14507 | rs11594562 |
| 94207777 | 14893 | rs3781239 |
| 94208177 | 15293 | rs3824738 |
| 94208228 | 15344 | rs12782629 |
| 94208261 | 15377 | rs12261501 |
| 94208278 | 15394 | rs12781670 |
| 94208383 | 15499 | rs568657 |
| 94208423 | 15539 | rs509954 |
| 94209484 | 16600 | rs489517 |
| 94209509 | 16625 | rs9420586 |
| 94209578 | 16694 | rs11187010 |
| 94209597 | 16713 | rs2247348 |
| 94209748 | 16864 | rs307638 |
| 94210585 | 17701 | rs35118791 |
| 94210625 | 17741 | rs520711 |
| 94211102 | 18218 | rs7098739 |
| 94211382 | 18498 | rs7081224 |
| 94211591 | 18707 | rs7093437 |
| 94212604 | 19720 | rs551266 |
| 94213696 | 20812 | rs1042444 |
| 94213766 | 20882 | rs7087334 |
| 94214145 | 21261 | rs1887922 |
| 94214615 | 21731 | rs7898862 |
| 94214726 | 21842 | rs10882066 |
| 94214869 | 21985 | rs11187011 |
| 94214932 | 22048 | rs7916011 |
| 94214997 | 22113 | rs7899603 |
| 94215212 | 22328 | rs34934289 |
| 94215235 | 22351 | rs12242504 |
| 94215277 | 22393 | rs2275218 |
| 94215373 | 22489 | rs538469 |
| 94215528 | 22644 | rs35640611 |
| 94215823 | 22939 | rs11187012 |
| 94216140 | 23256 | rs11187013 |
| 94216829 | 23945 | rs7893352 |
| 94217818 | 24934 | rs11187014 |
| 94218798 | 25914 | rs544537 |
| 94218805 | 25921 | rs12243622 |
| 94219607 | 26723 | rs11187015 |
| 94219726 | 26842 | rs7920976 |
| 94219892 | 27008 | rs4646957 |
| 94220409 | 27525 | rs11187016 |
| 94221786 | 28902 | rs2250090 |
| 94222227 | 29343 | rs2149632 |
| 94222398 | 29514 | rs35959170 |
| 94222860 | 29976 | rs35551274 |
| 94222881 | 29997 | rs7087153 |
| 94222964 | 30080 | rs12762802 |
| 94223038 | 30154 | rs12763971 |
| 94223085 | 30201 | rs11187017 |
| 94223100 | 30216 | rs2249960 |
| 94223275 | 30391 | rs12262931 |
| 94223719 | 30835 | rs11187018 |
| 94223794 | 30910 | rs11323400 |
| 94223971 | 31087 | rs7092468 |
| 94224735 | 31851 | rs12245118 |
| 94224789 | 31905 | rs35223317 |
| 94226905 | 34021 | rs35637537 |
| 94227236 | 34352 | rs35291821 |
| 94227390 | 34506 | rs7073248 |
| 94227405 | 34521 | rs7091270 |
| 94227647 | 34763 | rs12251346 |
| 94227782 | 34898 | rs6583815 |
| 94227902 | 35018 | rs12411941 |
| 94227937 | 35053 | rs17875326 |
| 94228149 | 35265 | rs7077626 |
| 94228919 | 36035 | rs35864975 |
| 94229152 | 36268 | rs5030982 |
| 94229349 | 36465 | rs3831274 |
| 94229366 | 36482 | rs35611772 |
| 94229773 | 36889 | rs7910605 |
| 94231074 | 38190 | rs12356508 |
| 94231328 | 38444 | rs34093069 |
| 94231497 | 38613 | rs35831196 |
| 94232484 | 39600 | rs35250835 |
| 94232485 | 39601 | rs5786998 |
| 94232486 | 39602 | rs35368064 |
| 94233186 | 40302 | rs12243214 |
| 94233203 | 40319 | rs7917817 |
| 94233597 | 40713 | rs2421940 |
| 94234183 | 41299 | rs35120790 |
| 94234248 | 41364 | rs10882067 |
| 94234880 | 41996 | rs35436518 |
| 94234881 | 41997 | rs34615998 |
| 94234883 | 41999 | rs11595475 |
| 94235591 | 42707 | rs35243007 |
| 94236972 | 44088 | rs35426658 |
| 94237227 | 44343 | rs6583817 |
| 94237240 | 44356 | rs35863982 |
| 94237312 | 44428 | rs35532620 |
| 94238290 | 45406 | rs11187019 |
| 94238346 | 45462 | rs12219139 |
| 94238396 | 45512 | rs12219148 |
| 94238509 | 45625 | rs34930778 |
| 94238512 | 45628 | rs36015364 |
| 94238730 | 45846 | rs11187020 |
| 94239054 | 46170 | rs35650880 |
| 94239749 | 46865 | rs7093418 |
| 94239850 | 46966 | rs11596251 |
| 94239962 | 47078 | rs3737225 |
| 94241364 | 48480 | rs11444132 |
| 94241365 | 48481 | rs34841034 |
| 94242628 | 49744 | rs11187021 |
| 94243163 | 50279 | rs3837333 |
| 94243164 | 50280 | rs34838821 |
| 94243184 | 50300 | rs3781238 |
| 94243185 | 50301 | rs35973022 |
| 94243185 | 50301 | rs3781237 |
| 94243606 | 50722 | rs10882068 |
| 94244183 | 51299 | rs1855917 |
| 94244263 | 51379 | rs1855916 |
| 94245019 | 52135 | rs10882069 |
| 94245021 | 52137 | rs9420151 |
| 94245023 | 52139 | rs11187022 |
| 94245061 | 52177 | rs10882070 |
| 94245384 | 52500 | rs7075073 |
| 94246000 | 53116 | rs11187024 |
| 94246773 | 53889 | rs11598525 |
| 94246972 | 54088 | rs34822156 |
| 94247198 | 54314 | rs7084090 |
| 94247956 | 55072 | rs11187025 |
| 94247994 | 55110 | rs6583818 |
| 94249045 | 56161 | rs34666358 |
| 94249117 | 56233 | rs11187026 |
| 94249160 | 56276 | rs11187027 |
| 94249226 | 56342 | rs34459034 |
| 94249288 | 56404 | rs11187028 |
| 94249316 | 56432 | rs36049328 |
| 94249679 | 56795 | rs7097800 |
| 94249948 | 57064 | rs10786048 |
| 94250085 | 57201 | rs10882071 |
| 94250350 | 57466 | rs12249976 |
| 94250507 | 57623 | rs7068618 |
| 94250611 | 57727 | rs11187029 |
| 94250692 | 57808 | rs10882072 |
| 94250983 | 58099 | rs11187030 |
| 94251771 | 58887 | rs11187031 |
| 94251786 | 58902 | rs11187032 |
| 94252339 | 59455 | rs11187033 |
| 94252515 | 59631 | rs11187034 |
| 94252799 | 59915 | rs11442945 |
| 94253137 | 60253 | rs11187035 |
| 94253203 | 60319 | rs1970244 |
| 94253341 | 60457 | rs11187037 |
| 94253515 | 60631 | rs1970245 |
| 94253764 | 60880 | rs5786999 |
| 94253765 | 60881 | rs34057954 |
| 94253766 | 60882 | rs10716816 |
| 94254606 | 61722 | rs34708742 |
| 94254765 | 61881 | rs35101389 |
| 94254975 | 62091 | rs11187038 |
| 94255082 | 62198 | rs34174850 |
| 94256325 | 63441 | rs34053974 |
| 94256855 | 63971 | rs11296200 |
| 94257747 | 64863 | rs11460471 |
| 94258212 | 65328 | rs11286004 |
| 94258296 | 65412 | rs5787000 |
| 94258297 | 65413 | rs33917554 |
| 94258314 | 65430 | rs1832196 |
| 94258319 | 65435 | rs34194084 |
| 94258381 | 65497 | rs1832195 |
| 94258980 | 66096 | rs35636429 |
| 94259168 | 66284 | rs4256898 |
| 94259346 | 66462 | rs34663898 |
| 94259587 | 66703 | rs6583819 |
| 94259670 | 66786 | rs11324773 |
| 94259792 | 66908 | rs11187039 |
| 94260389 | 67505 | rs34662862 |
| 94260838 | 67954 | rs35891632 |
| 94260859 | 67975 | rs10882073 |
| 94260983 | 68099 | rs11498516 |
| 94261156 | 68272 | rs17445028 |
| 94261438 | 68554 | rs35831688 |
| 94262303 | 69419 | rs11373926 |
| 94262304 | 69420 | rs35405697 |
| 94262311 | 69427 | rs35377675 |
| 94262679 | 69795 | rs34457657 |
| 94262685 | 69801 | rs34774587 |
| 94262844 | 69960 | rs11187040 |
| 94263091 | 70207 | rs7086558 |
| 94263344 | 70460 | rs7910569 |
| 94263586 | 70702 | rs34673600 |
| 94264572 | 71688 | rs35270297 |
| 94264650 | 71766 | rs4646956 |
| 94264789 | 71905 | rs17875327 |
| 94265538 | 72654 | rs9633693 |
| 94266128 | 73244 | rs12780132 |
| 94266506 | 73622 | rs7895832 |
| 94266635 | 73751 | rs6583820 |
| 94267645 | 74761 | rs7093773 |
| 94267750 | 74866 | rs12257226 |
| 94267766 | 74882 | rs7075851 |
| 94267846 | 74962 | rs10509645 |
| 94268591 | 75707 | rs35693308 |
| 94271124 | 78240 | rs11812558 |
| 94271625 | 78741 | rs11187042 |
| 94271665 | 78781 | rs10882074 |
| 94271861 | 78977 | rs11187043 |
| 94272258 | 79374 | rs11187044 |
| 94272698 | 79814 | rs7915971 |
| 94273091 | 80207 | rs4933233 |
| 94273288 | 80404 | rs35361515 |
| 94273349 | 80465 | rs11187045 |
| 94273885 | 81001 | rs35296767 |
| 94273981 | 81097 | rs11187046 |
| 94274088 | 81204 | rs11813097 |
| 94274094 | 81210 | rs10882075 |
| 94274100 | 81216 | rs10882076 |
| 94274121 | 81237 | rs11187047 |
| 94274127 | 81243 | rs11187048 |
| 94274129 | 81245 | rs11187049 |
| 94274135 | 81251 | rs11187050 |
| 94274143 | 81259 | rs11187051 |
| 94274150 | 81266 | rs11187052 |
| 94274183 | 81299 | rs11818981 |
| 94274184 | 81300 | rs11818982 |
| 94274213 | 81329 | rs11187053 |
| 94274245 | 81361 | rs12355280 |
| 94274246 | 81362 | rs12359894 |
| 94274253 | 81369 | rs11187054 |
| 94274787 | 81903 | rs12358677 |
| 94275109 | 82225 | rs35688800 |
| 94275207 | 82323 | rs12261046 |
| 94275338 | 82454 | rs12261114 |
| 94275379 | 82495 | rs12261174 |
| 94275382 | 82498 | rs7894448 |
| 94275487 | 82603 | rs12262694 |
| 94275508 | 82624 | rs4641376 |
| 94275509 | 82625 | rs35586301 |
| 94276174 | 83290 | rs11187055 |
| 94276314 | 83430 | rs7089987 |
| 94276400 | 83516 | rs7073833 |
| 94276465 | 83581 | rs10882077 |
| 94276595 | 83711 | rs11459412 |
| 94276596 | 83712 | rs34975586 |
| 94277360 | 84476 | rs2421942 |
| 94280464 | 87580 | rs7078413 |
| 94280662 | 87778 | rs7079099 |
| 94280746 | 87862 | rs12258487 |
| 94281644 | 88760 | rs34747737 |
| 94281681 | 88797 | rs7901064 |
| 94282086 | 89202 | rs17107709 |
| 94282197 | 89313 | rs868057 |
| 94283137 | 90253 | rs34880105 |
| 94283469 | 90585 | rs35455474 |
| 94283592 | 90708 | rs11819413 |
| 94283667 | 90783 | rs11187056 |
| 94283823 | 90939 | rs1855915 |
| 94283919 | 91035 | rs12268712 |
| 94284271 | 91387 | rs4646955 |
| 94285010 | 92126 | rs7898114 |
| 94285220 | 92336 | rs11450948 |
| 94285221 | 92337 | rs35571064 |
| 94285296 | 92412 | rs7898493 |
| 94285778 | 92894 | rs7077418 |
| 94286057 | 93173 | rs11187057 |
| 94286438 | 93554 | rs34460166 |
| 94286967 | 94083 | rs2275221 |
| 94288311 | 95427 | rs1832197 |
| 94288480 | 95596 | rs17107721 |
| 94288514 | 95630 | rs5787001 |
| 94288515 | 95631 | rs34593706 |
| 94288516 | 95632 | rs11187059 |
| 94288531 | 95647 | rs12249288 |
| 94290376 | 97492 | rs12416180 |
| 94292030 | 99146 | rs10882078 |
| 94292741 | 99857 | rs11815736 |
| 94293623 | 100739 | rs5004594 |
| 94293624 | 100740 | rs1970243 |
| 94293625 | 100741 | rs33928713 |
| 94293625 | 100741 | rs5787002 |
| 94293956 | 101072 | rs12218329 |
| 94294112 | 101228 | rs11187060 |
| 94294428 | 101544 | rs7915349 |
| 94295169 | 102285 | rs17445328 |
| 94295389 | 102505 | rs11187061 |
| 94295397 | 102513 | rs17107734 |
| 94296406 | 103522 | rs11187062 |
| 94296563 | 103679 | rs10218994 |
| 94296625 | 103741 | rs17445419 |
| 94296937 | 104053 | rs12219325 |
| 94297315 | 104431 | rs11286362 |
| 94297863 | 104979 | rs10786049 |
| 94297879 | 104995 | rs7900822 |
| 94298098 | 105214 | rs11187063 |
| 94298233 | 105349 | rs11187064 |
| 94298446 | 105562 | rs10219017 |
| 94299005 | 106121 | rs34494546 |
| 94299843 | 106959 | rs7909636 |
| 94300255 | 107371 | rs34330550 |
| 94300414 | 107530 | rs10882079 |
| 94300889 | 108005 | rs12220493 |
| 94301795 | 108911 | rs2421943 |
| 94301904 | 109020 | rs11187065 |
| 94302165 | 109281 | rs4406744 |
| 94302446 | 109562 | rs35156639 |
| 94303116 | 110232 | rs1987122 |
| 94303124 | 110240 | rs9420144 |
| 94303675 | 110791 | rs35707435 |
| 94304293 | 111409 | rs11418454 |
| 94304299 | 111415 | rs11424864 |
| 94304548 | 111664 | rs6583821 |
| 94304589 | 111705 | rs10882080 |
| 94304784 | 111900 | rs7908111 |
| 94305004 | 112120 | rs10882081 |
| 94306623 | 113739 | rs7902106 |
| 94306803 | 113919 | rs12415874 |
| 94306808 | 113924 | rs7917163 |
| 94307486 | 114602 | rs4933728 |
| 94307610 | 114726 | rs12412249 |
| 94307630 | 114746 | rs3051565 |
| 94307851 | 114967 | rs11187066 |
| 94307892 | 115008 | rs10882082 |
| 94308049 | 115165 | rs7098744 |
| 94308378 | 115494 | rs12777622 |
| 94308408 | 115524 | rs12779093 |
| 94308409 | 115525 | rs12777974 |
| 94309312 | 116428 | rs11187067 |
| 94309594 | 116710 | rs12765408 |
| 94309595 | 116711 | rs34052181 |
| 94309972 | 117088 | rs1999763 |
| 94310119 | 117235 | rs1999764 |
| 94310400 | 117516 | rs11187068 |
| 94310514 | 117630 | rs7078418 |
| 94310644 | 117760 | rs35429533 |
| 94310846 | 117962 | rs11187069 |
| 94311213 | 118329 | rs34630015 |
| 94311876 | 118992 | rs12264361 |
| 94311953 | 119069 | rs10882083 |
| 94312407 | 119523 | rs12264682 |
| 94312615 | 119731 | rs11187070 |
| 94312726 | 119842 | rs12266443 |
| 94312981 | 120097 | rs12776190 |
| 94313002 | 120118 | rs4933729 |
| 94313190 | 120306 | rs12774925 |
| 94313202 | 120318 | rs12774931 |
| 94314015 | 121131 | rs11187071 |
| 94314384 | 121500 | rs35009022 |
| 94314389 | 121505 | rs11187072 |
| 94314566 | 121682 | rs12241107 |
| 94314708 | 121824 | rs11187073 |
| 94314816 | 121932 | rs12763871 |
| 94314968 | 122084 | rs35418143 |
| 94315124 | 122240 | rs12411517 |
| 94315147 | 122263 | rs11308616 |
| 94315157 | 122273 | rs33935672 |
| 94315157 | 122273 | rs5787003 |
| 94315491 | 122607 | rs7076966 |
| 94315748 | 122864 | rs5787004 |
| 94315751 | 122867 | rs35925526 |
| 94315930 | 123046 | rs5787005 |
| 94315944 | 123060 | rs34378303 |
| 94316148 | 123264 | rs2901598 |
| 94316150 | 123266 | rs2421944 |
| 94316175 | 123291 | rs34777726 |
| 94316176 | 123292 | rs3051566 |
| 94316766 | 123882 | rs12253172 |
| 94316799 | 123915 | rs12253177 |
| 94316926 | 124042 | rs11187074 |
| 94317075 | 124191 | rs7082686 |
| 94317136 | 124252 | rs7100623 |
| 94317536 | 124652 | rs12255048 |
| 94317963 | 125079 | rs12355977 |
| 94318001 | 125117 | rs35616984 |
| 94318580 | 125696 | rs35826224 |
| 94318582 | 125698 | rs10584127 |
| 94318582 | 125698 | rs7915220 |
| 94318992 | 126108 | rs11437287 |
| 94318993 | 126109 | rs35875721 |
| 94319093 | 126209 | rs10882084 |
| 94320200 | 127316 | rs7097014 |
| 94321033 | 128149 | rs12415246 |
| 94321119 | 128235 | rs4304670 |
| 94321321 | 128437 | rs2421945 |
| 94321612 | 128728 | rs12252447 |
| 94321742 | 128858 | rs10736067 |
| 94322696 | 129812 | rs7909487 |
| 94323150 | 130266 | rs34093946 |
| 94323222 | 130338 | rs12783634 |
| 94323807 | 130923 | rs4646954 |
| 94323935 | 131051 | rs4646953 |
| 94323955 | 131071 | rs35380063 |
| 94324493 | 131609 | rs17875328 |
| 94324556 | 131672 | rs34867369 |
| 94324758 | 131874 | rs3758505 |
| 94325575 | 132691 | rs11379220 |
| 94325779 | 132895 | rs7099761 |
| 94326009 | 133125 | rs11187075 |
| 94326342 | 133458 | rs35628053 |
| 94326394 | 133510 | rs3758504 |
| 94326684 | 133800 | rs3758503 |
| 94326943 | 134059 | rs11187076 |
| 94327161 | 134277 | rs35376801 |
| 94327403 | 134519 | rs12762388 |
| 94327431 | 134547 | rs12762406 |
| 94327438 | 134554 | rs12764060 |
| 94327683 | 134799 | rs4933730 |
| 94327871 | 134987 | rs7900584 |
| 94328020 | 135136 | rs12414433 |
| 94328211 | 135327 | rs7900991 |
| 94328632 | 135748 | rs7921325 |
| 94328678 | 135794 | rs7905037 |
| 94330087 | 137203 | rs11187077 |
| 94330685 | 137801 | rs11187078 |
| 94330689 | 137805 | rs11273566 |
| 94331181 | 138297 | rs6583822 |
| 94331572 | 138688 | rs11187079 |
| 94331642 | 138758 | rs7069538 |
| 94331770 | 138886 | rs7087423 |
| 94332643 | 139759 | rs2901597 |
| 94332963 | 140079 | rs7092522 |
| 94332992 | 140108 | rs12766927 |
| 94333545 | 140661 | rs11187080 |
| 94334378 | 141494 | rs34210106 |
| 94334395 | 141511 | rs6583823 |
| 94334850 | 141966 | rs7084215 |
| 94334897 | 142013 | rs6583824 |
| 94335207 | 142323 | rs6583825 |
| 94335889 | 143005 | rs2421941 |
| 94336041 | 143157 | rs12262994 |
| 94336117 | 143233 | rs12263054 |
| 94336859 | 143975 | rs12573146 |
| 94337053 | 144169 | rs11187081 |
| 94337295 | 144411 | rs34143873 |
| 94337314 | 144430 | rs11455878 |
| 94337315 | 144431 | rs35480775 |
| 94337549 | 144665 | rs7921210 |
| 94337810 | 144926 | rs6583826 |
| 94338024 | 145140 | rs12776949 |
| 94338180 | 145296 | rs7922041 |
| 94338205 | 145321 | rs34073794 |
| 94338626 | 145742 | rs10701812 |
| 94338815 | 145931 | rs7911019 |
| 94339556 | 146672 | rs7898478 |
| 94340196 | 147312 | rs4611114 |
| 94340487 | 147603 | rs1889894 |
| 94340661 | 147777 | rs12355158 |
| 94341882 | 148998 | rs17875329 |
| 94341915 | 149031 | rs11595187 |
| 94341951 | 149067 | rs17875331 |
| 94342066 | 149182 | rs17875332 |
| 94342135 | 149251 | rs11595260 |
| 94342136 | 149252 | rs11599701 |
| 94342406 | 149522 | rs7092778 |
| 94342485 | 149601 | rs11187083 |
| 94342495 | 149611 | rs17875333 |
| 94342598 | 149714 | rs11187084 |
| 94342803 | 149919 | rs2297743 |
| 94343099 | 150215 | rs36015451 |
| 94343258 | 150374 | rs12256435 |
| 94343418 | 150534 | rs11818332 |
| 94343843 | 150959 | rs3781236 |
| 94344062 | 151178 | rs3824736 |
| 94344184 | 151300 | rs3824735 |
| 94344608 | 151724 | rs11429679 |
| 94344609 | 151725 | rs34491012 |
| 94344692 | 151808 | rs11187085 |
| 94344951 | 152067 | rs11187086 |
| 94345504 | 152620 | rs11817798 |
| 94345575 | 152691 | rs12240557 |
| 94345783 | 152899 | rs35583124 |
| 94345930 | 153046 | rs12262350 |
| 94346261 | 153377 | rs11187087 |
| 94346544 | 153660 | rs7099635 |
| 94346892 | 154008 | rs4604791 |
| 94346932 | 154048 | rs11556038 |
| 94347159 | 154275 | rs7082683 |
| 94348003 | 155119 | rs6583827 |
| 94349194 | 156310 | rs11187089 |
| 94349700 | 156816 | rs12218324 |
| 94349861 | 156977 | rs11498685 |
| 94350652 | 157768 | rs11187090 |
| 94350841 | 157957 | rs12411873 |
| 94351226 | 158342 | rs7068118 |
| 94351364 | 158480 | rs35624581 |
| 94351461 | 158577 | rs35982149 |
| 94352267 | 159383 | rs35452156 |
| 94352383 | 159499 | rs35807258 |
| 94352546 | 159662 | rs10564653 |
| 94352561 | 159677 | rs7095250 |
| 94352562 | 159678 | rs7095369 |
| 94352579 | 159695 | rs10564753 |
| 94352593 | 159709 | rs3980475 |
| 94352908 | 160024 | rs7096101 |
| 94353042 | 160158 | rs9733604 |
| 94353107 | 160223 | rs12266122 |
| 94353183 | 160299 | rs7096520 |
| 94353519 | 160635 | rs35612167 |
| 94353973 | 161089 | rs4933731 |
| 94354724 | 161840 | rs11187091 |
| 94354862 | 161978 | rs10882085 |
| 94354869 | 161985 | rs12763703 |
| 94355005 | 162121 | rs10882086 |
| 94355421 | 162537 | rs11812310 |
| 94355638 | 162754 | rs11187092 |
| 94355673 | 162789 | rs12242681 |
| 94355721 | 162837 | rs12257279 |
| 94356330 | 163446 | rs11393423 |
| 94356331 | 163447 | rs35558317 |
| 94356578 | 163694 | rs12244660 |
| 94356605 | 163721 | rs12244573 |
| 94356815 | 163931 | rs12244809 |
| 94356878 | 163994 | rs12259474 |
| 94356984 | 164100 | rs17875334 |
| 94357013 | 164129 | rs17107758 |
| 94357210 | 164326 | rs10786050 |
| 94357829 | 164945 | rs12246900 |
| 94357847 | 164963 | rs10882087 |
| 94357897 | 165013 | rs12261518 |
| 94357989 | 165105 | rs11187093 |
| 94358032 | 165148 | rs12247024 |
| 94358158 | 165274 | rs11187094 |
| 94358195 | 165311 | rs12261697 |
| 94358568 | 165684 | rs10882088 |
| 94358636 | 165752 | rs12248860 |
| 94359005 | 166121 | rs3835295 |
| 94359040 | 166156 | rs10882089 |
| 94359040 | 166156 | rs34446454 |
| 94359042 | 166158 | rs11187095 |
| 94359042 | 166158 | rs3835294 |
| 94359044 | 166160 | rs12767141 |
| 94359496 | 166612 | rs12250905 |
| 94359568 | 166684 | rs11187096 |
| 94359915 | 167031 | rs12356724 |
| 94360614 | 167730 | rs11599330 |
| 94361073 | 168189 | rs35352564 |
| 94362686 | 169802 | rs2275220 |
| 94362922 | 170038 | rs2275219 |
| 94363760 | 170876 | rs10882090 |
| 94364357 | 171473 | rs10882091 |
| 94364583 | 171699 | rs11187097 |
| 94364871 | 171987 | rs11187098 |
| 94364977 | 172093 | rs11187099 |
| 94365856 | 172972 | rs12252642 |
| 94366308 | 173424 | rs12252836 |
| 94366409 | 173525 | rs17875338 |
| 94366437 | 173553 | rs17875337 |
| 94366604 | 173720 | rs33921491 |
| 94366606 | 173722 | rs10550249 |
| 94366638 | 173754 | rs34075743 |
| 94366848 | 173964 | rs7069647 |
| 94367517 | 174633 | rs11187100 |
| 94367754 | 174870 | rs11187101 |
| 94367943 | 175059 | rs12415792 |
| 94368029 | 175145 | rs3980476 |
| 94368183 | 175299 | rs12767059 |
| 94368830 | 175946 | rs6583828 |
| 94368857 | 175973 | rs11517020 |
| 94369044 | 176160 | rs34515231 |
| 94369203 | 176319 | rs10882092 |
| 94369352 | 176468 | rs6583829 |
| 94369694 | 176810 | rs12260688 |
| 94369814 | 176930 | rs12781567 |
| 94370112 | 177228 | rs7084441 |
| 94371113 | 178229 | rs17875339 |
| 94371489 | 178605 | rs11187102 |
| 94371558 | 178674 | rs11187103 |
| 94371597 | 178713 | rs34942989 |
| 94371629 | 178745 | rs11817621 |
| 94371641 | 178757 | rs11815573 |
| 94371998 | 179114 | rs11187104 |
| 94372020 | 179136 | rs7894183 |
| 94372150 | 179266 | rs12254289 |
| 94372405 | 179521 | rs36031409 |
| 94372432 | 179548 | rs12262063 |
| 94372442 | 179558 | rs7914248 |
| 94372445 | 179561 | rs12254474 |
| 94372736 | 179852 | rs7898027 |
| 94372930 | 180046 | rs7914814 |
| 94372946 | 180062 | rs7898506 |
| 94373054 | 180170 | rs17367408 |
| 94373182 | 180298 | rs10082524 |
| 94373409 | 180525 | rs7091887 |
| 94373424 | 180540 | rs7073868 |
| 94373661 | 180777 | rs7095585 |
| 94373838 | 180954 | rs12772554 |
| 94373970 | 181086 | rs12772956 |
| 94374055 | 181171 | rs10882093 |
| 94374407 | 181523 | rs11187105 |
| 94374449 | 181565 | rs12258463 |
| 94374494 | 181610 | rs35518831 |
| 94374496 | 181612 | rs34197740 |
| 94374497 | 181613 | rs35008887 |
| 94374498 | 181614 | rs35083945 |
| 94375670 | 182786 | rs11187106 |
| 94376102 | 183218 | rs7071905 |
| 94376134 | 183250 | rs7087860 |
| 94376451 | 183567 | rs35368950 |
| 94376836 | 183952 | rs7915915 |
| 94376918 | 184034 | rs12264372 |
| 94377314 | 184430 | rs1573051 |
| 94377656 | 184772 | rs10882094 |
| 94378087 | 185203 | rs12244924 |
| 94378491 | 185607 | rs17875340 |
| 94379385 | 186501 | rs11417254 |
| 94379401 | 186517 | rs7068540 |
| 94379725 | 186841 | rs28692618 |
| 94380110 | 187226 | rs35297001 |
| 94380403 | 187519 | rs7073739 |
| 94380415 | 187531 | rs11595797 |
| 94380535 | 187651 | rs12243009 |
| 94380591 | 187707 | rs7077137 |
| 94381028 | 188144 | rs9731595 |
| 94381254 | 188370 | rs7078403 |
| 94381345 | 188461 | rs7078179 |
| 94381677 | 188793 | rs11187107 |
| 94382267 | 189383 | rs2275217 |
| 94382439 | 189555 | rs17107764 |
| 94382499 | 189615 | rs10639509 |
| 94382499 | 189615 | rs17875342 |
| 94382500 | 189616 | rs34767899 |
| 94382708 | 189824 | rs11818705 |
| 94382761 | 189877 | rs11818708 |
| 94382810 | 189926 | rs11818750 |
| 94382815 | 189931 | rs5787006 |
| 94383610 | 190726 | rs11187108 |
| 94383671 | 190787 | rs3051599 |
| 94383672 | 190788 | rs35996949 |
| 94383672 | 190788 | rs2421946 |
| 94383672 | 190788 | rs5787007 |
| 94383674 | 190790 | rs34710486 |
| 94383765 | 190881 | rs28615450 |
| 94383941 | 191057 | rs10736068 |
| 94383978 | 191094 | rs11819282 |
| 94384075 | 191191 | rs11819301 |
| 94384310 | 191426 | rs11819351 |
| 94384382 | 191498 | rs10882095 |
| 94384580 | 191696 | rs7070990 |
| 94385075 | 192191 | rs7089765 |
| 94385373 | 192489 | rs10736069 |
| 94385475 | 192591 | rs12257072 |
| 94385728 | 192844 | rs7900689 |
| 94386335 | 193451 | rs11812813 |
| 94386492 | 193608 | rs4933732 |
| 94386500 | 193616 | rs11594678 |
| 94386540 | 193656 | rs11813238 |
| 94386568 | 193684 | rs1972360 |
| 94386594 | 193710 | rs11816962 |
| 94386703 | 193819 | rs4558084 |
| 94386890 | 194006 | rs34948996 |
| 94387372 | 194488 | rs1547818 |
| 94387496 | 194612 | rs34497717 |
| 94387741 | 194857 | rs7069680 |
| 94387964 | 195080 | rs7085790 |
| 94388094 | 195210 | rs36015190 |
| 94388098 | 195214 | rs6583830 |
| 94388569 | 195685 | rs7090402 |
| 94388954 | 196070 | rs11187109 |
| 94389669 | 196785 | rs35137137 |
| 94389736 | 196852 | rs35494689 |
| 94390313 | 197429 | rs6583831 |
| 94390339 | 197455 | rs11187110 |
| 94390489 | 197605 | rs11187111 |
| 94390602 | 197718 | rs4933733 |
| 94390673 | 197789 | rs34848251 |
| 94390842 | 197958 | rs7922902 |
| 94391081 | 198197 | rs11282830 |
| 94391082 | 198198 | rs35084253 |
| 94391352 | 198468 | rs6583832 |
| 94391366 | 198482 | rs10882096 |
| 94391873 | 198989 | rs7079583 |
| 94391950 | 199066 | rs7079602 |
| 94391966 | 199082 | rs11187112 |
| 94392278 | 199394 | rs12244429 |
| 94393212 | 200328 | rs35312216 |
| 94393281 | 200397 | rs28576319 |
| 94393578 | 200694 | rs7088685 |
| 94394524 | 201640 | rs17107776 |
| 94394677 | 201793 | rs7902436 |
| 94394804 | 201920 | rs7917359 |
| 94395324 | 202440 | rs36070037 |
| 94395344 | 202460 | rs34647366 |
| 94395706 | 202822 | rs33915127 |
| 94396217 | 203333 | rs11187114 |
| 94396832 | 203948 | rs7069619 |
| 94397097 | 204213 | rs34629164 |
| 94397263 | 204379 | rs11187115 |
| 94397647 | 204763 | rs7073957 |
| 94397851 | 204967 | rs10686721 |
| 94397859 | 204975 | rs34357393 |
| 94397981 | 205097 | rs36046902 |
| 94398388 | 205504 | rs12264712 |
| 94398585 | 205701 | rs34132402 |
| 94398837 | 205953 | rs12358273 |
| 94398866 | 205982 | rs35625726 |
| 94398869 | 205985 | rs11285704 |
| 94399729 | 206845 | rs7067733 |
| 94399780 | 206896 | rs6583833 |
| 94399806 | 206922 | rs35230377 |
| 94400137 | 207253 | rs10430651 |
| 94400806 | 207922 | rs12262781 |
| 94400870 | 207986 | rs12359115 |
| 94401006 | 208122 | rs12359131 |
| 94401155 | 208271 | rs7898318 |
| 94401180 | 208296 | rs12359158 |
| 94401236 | 208352 | rs12359159 |
| 94401240 | 208356 | rs12764793 |
| 94401245 | 208361 | rs12764800 |
| 94401246 | 208362 | rs12241432 |
| 94401250 | 208366 | rs11383128 |
| 94401253 | 208369 | rs7898430 |
| 94401708 | 208824 | rs35738968 |
| 94401710 | 208826 | rs10537782 |
| 94401720 | 208836 | rs36000362 |
| 94401732 | 208848 | rs7893798 |
| 94402105 | 209221 | rs11187116 |
| 94402138 | 209254 | rs11187117 |
| 94402166 | 209282 | rs11187118 |
| 94402579 | 209695 | rs12411448 |
| 94402726 | 209842 | rs35910196 |
| 94402828 | 209944 | rs34963356 |
| 94403360 | 210476 | rs17875344 |
| 94403488 | 210604 | rs34417963 |
| 94403643 | 210759 | rs41290170 |
| 94403647 | 210763 | rs17875345 |
| 94403675 | 210791 | rs41290172 |
| 94403774 | 210890 | rs41290174 |
| 94403917 | 211033 | rs1044146 |
| 94403990 | 211106 | rs17875346 |
| 94404243 | 211359 | rs7078243 |
| 94404370 | 211486 | rs11187119 |
| 94404390 | 211506 | rs36107638 |
| 94404547 | 211663 | rs4933734 |
| 94404618 | 211734 | rs17875347 |
| 94405058 | 212174 | rs1044153 |
| 94405646 | 212762 | rs11187120 |
| 94405813 | 212929 | rs35698103 |
| 94406209 | 213325 | rs7071912 |
| 94406381 | 213497 | rs11597699 |
| 94406501 | 213617 | rs11598250 |
| 94406519 | 213635 | rs35135018 |
| 94406834 | 213950 | rs12242617 |
| 94407185 | 214301 | rs12264496 |
| 94407201 | 214317 | rs11814562 |
| 94407283 | 214399 | rs7916594 |
| 94407322 | 214438 | rs7093043 |
| 94407327 | 214443 | rs7092669 |
| 94407904 | 215020 | rs12244738 |
| 94408110 | 215226 | rs12573394 |
| 94408195 | 215311 | rs34223527 |
| 94408405 | 215521 | rs7921040 |
| 94408480 | 215596 | rs35583259 |
| 94408734 | 215850 | rs2901599 |
| 94409046 | 216162 | rs11187122 |
| 94409276 | 216392 | rs6583834 |
| 94410546 | 217662 | rs7076842 |
| 94411653 | 218769 | rs9804194 |
| 94411998 | 219114 | rs7914504 |
| 94412220 | 219336 | rs35580348 |
| 94412694 | 219810 | rs7079361 |
| 94412743 | 219859 | rs7095377 |
| 94413406 | 220522 | rs7096187 |
| 94413485 | 220601 | rs6583835 |
| 94413764 | 220880 | rs6583836 |
| 94413791 | 220907 | rs7100344 |
| 94414053 | 221169 | rs2153827 |
| 94414178 | 221294 | rs6583837 |
| 94414402 | 221518 | rs35978445 |
| 94414724 | 221840 | rs2497321 |
| 94414758 | 221874 | rs2497320 |
| 94415097 | 222213 | rs11187124 |
| 94415101 | 222217 | rs7913315 |
| 94415116 | 222232 | rs2497319 |
| 94415147 | 222263 | rs7071919 |
| 94416183 | 223299 | rs2488058 |
| 94416216 | 223332 | rs2488057 |
| 94417125 | 224241 | rs34940159 |
| 94417197 | 224313 | rs12776166 |
| 94417669 | 224785 | rs11187125 |
| 94418089 | 225205 | rs7910187 |
| 94418694 | 225810 | rs7914114 |
| 94418703 | 225819 | rs11554568 |
| 94418859 | 225975 | rs7914143 |
| 94418888 | 226004 | rs1832887 |
| 94418890 | 226006 | rs1418391 |
| 94418990 | 226106 | rs7914507 |
| 94419062 | 226178 | rs17875348 |
| 94419074 | 226190 | rs7899695 |
| 94419424 | 226540 | rs12414381 |
| 94419447 | 226563 | rs7918084 |
| 94419491 | 226607 | rs7903302 |
| 94419506 | 226622 | rs11187126 |
| 94419569 | 226685 | rs11187127 |
| 94419688 | 226804 | rs11187128 |
| 94419689 | 226805 | rs12772782 |
| 94419887 | 227003 | rs11187129 |
| 94420477 | 227593 | rs2185756 |
| 94420505 | 227621 | rs9419741 |
| 94420766 | 227882 | rs34709928 |
| 94420766 | 227882 | rs34848369 |
| 94420877 | 227993 | rs35250649 |
| 94421300 | 228416 | rs9419742 |
| 94421540 | 228656 | rs11594482 |
| 94421980 | 229096 | rs2497318 |
| 94422308 | 229424 | rs2488055 |
| 94422330 | 229446 | rs6583838 |
| 94422446 | 229562 | rs2488054 |
| 94423353 | 230469 | rs7909334 |
| 94423442 | 230558 | rs35288203 |
| 94423443 | 230559 | rs7897560 |
| 94423460 | 230576 | rs35413668 |
| 94423462 | 230578 | rs7897565 |
| 94423473 | 230589 | rs12761997 |
| 94423750 | 230866 | rs34831256 |
| 94424074 | 231190 | rs4421685 |
| 94425223 | 232339 | rs28514404 |
| 94425223 | 232339 | rs28591207 |
| 94425307 | 232423 | rs35885794 |
| 94425468 | 232584 | rs7098199 |
| 94425577 | 232693 | rs34985734 |
| 94425653 | 232769 | rs35906730 |
| 94425663 | 232779 | rs4933735 |
| 94425739 | 232855 | rs7098638 |
| 94426831 | 233947 | rs7911264 |
| 94427225 | 234341 | rs11187131 |
| 94427575 | 234691 | rs11187132 |
| 94428318 | 235434 | rs11448446 |
| 94428319 | 235435 | rs34215006 |
| 94428322 | 235438 | rs11439271 |
| 94428328 | 235444 | rs35808040 |
| 94429339 | 236455 | rs34911167 |
| 94429434 | 236550 | rs11599074 |
| 94429447 | 236563 | rs12774356 |
| 94429484 | 236600 | rs12779070 |
| 94430250 | 237366 | rs28757342 |
| 94430530 | 237646 | rs35299744 |
| 94431405 | 238521 | rs7089358 |
| 94431962 | 239078 | rs35828108 |
| 94432143 | 239259 | rs34615602 |
| 94432674 | 239790 | rs7914280 |
| 94432723 | 239839 | rs17875349 |
| 94432994 | 240110 | rs34669790 |
| 94434773 | 241889 | rs10882098 |
| 94434827 | 241943 | rs12778051 |
| 94434836 | 241952 | rs11187133 |
| 94434881 | 241997 | rs11187134 |
| 94435923 | 243039 | rs2497317 |
| 94436021 | 243137 | rs2488087 |
| 94436103 | 243219 | rs12262390 |
| 94436615 | 243731 | rs10786052 |
| 94437076 | 244192 | rs10522178 |
| 94437120 | 244236 | rs10531158 |
| 94437559 | 244675 | rs12251379 |
| 94437891 | 245007 | rs949579 |
| 94438736 | 245852 | rs11187135 |
| 94438875 | 245991 | rs34593856 |
| 94439140 | 246256 | rs12781513 |
| 94439449 | 246565 | rs7475059 |
| 94439530 | 246646 | rs4075563 |
| 94439906 | 247022 | rs34266926 |
| 94439912 | 247028 | rs2229328 |
| 94439992 | 247108 | rs1418387 |
| 94440106 | 247222 | rs2901618 |
| 94440107 | 247223 | rs2901619 |
| 94440209 | 247325 | rs34372348 |
| 94440213 | 247329 | rs9420589 |
| 94441710 | 248826 | rs41290176 |
| 94442254 | 249370 | rs17851141 |
| 94442322 | 249438 | rs2275730 |
| 94442410 | 249526 | rs2275729 |
| 94443456 | 250572 | rs11319879 |
| 94443457 | 250573 | rs34616944 |
| 94444237 | 251353 | rs34433040 |
| 94445202 | 252318 | rs35423905 |
| 94445857 | 252973 | rs34619410 |
| 94448868 | 255984 | rs3076219 |
| 94449333 | 256449 | rs34231544 |
| 94449598 | 256714 | rs35657492 |
| 94450261 | 257377 | rs11187138 |
| 94450630 | 257746 | rs10882099 |
| 94450667 | 257783 | rs10882100 |
| 94451033 | 258149 | rs7100035 |
| 94451324 | 258440 | rs7100357 |
| 94451790 | 258906 | rs12263166 |
| 94451929 | 259045 | rs12263147 |
| 94451954 | 259070 | rs12218257 |
| 94451963 | 259079 | rs2488085 |
| 94451965 | 259081 | rs2497316 |
| 94452407 | 259523 | rs10882101 |
| 94452569 | 259685 | rs5787008 |
| 94452862 | 259978 | rs1111875 |
| 94453437 | 260553 | rs7921459 |
| 94453671 | 260787 | rs35245232 |
| 94453759 | 260875 | rs1977832 |
| 94453925 | 261041 | rs1977833 |
| 94453943 | 261059 | rs35396842 |
| 94453943 | 261059 | rs11309330 |
| 94453950 | 261066 | rs34470242 |
| 94454287 | 261403 | rs12778642 |
| 94454556 | 261672 | rs7911447 |
| 94454563 | 261679 | rs7894796 |
| 94454564 | 261680 | rs7911455 |
| 94454571 | 261687 | rs7895123 |
| 94455183 | 262299 | rs4933234 |
| 94455211 | 262327 | rs34991559 |
| 94455539 | 262655 | rs5015480 |
| 94456086 | 263202 | rs2497315 |
| 94456407 | 263523 | rs11187139 |
| 94456419 | 263535 | rs12219514 |
| 94456475 | 263591 | rs10882102 |
| 94456646 | 263762 | rs12572190 |
| 94456890 | 264006 | rs11187140 |
| 94456999 | 264115 | rs7904159 |
| 94457006 | 264122 | rs7904279 |
| 94457011 | 264127 | rs7904508 |
| 94457018 | 264134 | rs7904513 |
| 94457029 | 264145 | rs7904292 |
| 94457125 | 264241 | rs11187141 |
| 94457267 | 264383 | rs34744311 |
| 94458157 | 265273 | rs9419743 |
| 94458159 | 265275 | rs12254229 |
| 94458272 | 265388 | rs12246641 |
| 94458305 | 265421 | rs12246541 |
| 94458432 | 265548 | rs11813799 |
| 94458665 | 265781 | rs11187142 |
| 94458914 | 266030 | rs11187143 |
| 94459172 | 266288 | rs28590736 |
| 94459519 | 266635 | rs28428943 |
| 94459960 | 267076 | rs11187144 |
| 94460495 | 267611 | rs10882104 |
| 94460975 | 268091 | rs34859807 |
| 94460979 | 268095 | rs2497314 |
| 94461575 | 268691 | rs4933736 |
| 94462185 | 269301 | rs34966020 |
| 94462949 | 270065 | rs34290965 |
| 94463018 | 270134 | rs11817277 |
| 94463116 | 270232 | rs34600815 |
| 94463139 | 270255 | rs34793711 |
| 94463609 | 270725 | rs7087591 |
| 94464077 | 271193 | rs10786053 |
| 94464091 | 271207 | rs10882105 |
| 94464476 | 271592 | rs1578672 |
| 94465084 | 272200 | rs35705157 |
| 94465091 | 272207 | rs2901609 |
| 94465573 | 272689 | rs34405337 |
| 94465640 | 272756 | rs4545448 |
| 94466041 | 273157 | rs4504977 |
| 94466253 | 273369 | rs4262638 |
| 94466275 | 273391 | rs12777206 |
| 94466575 | 273691 | rs12782663 |
| 94466582 | 273698 | rs12782667 |
| 94466623 | 273739 | rs12781544 |
| 94467199 | 274315 | rs10748582 |
| 94467336 | 274452 | rs11378649 |
| 94467337 | 274453 | rs33926570 |
| 94467472 | 274588 | rs2488082 |
| 94467519 | 274635 | rs1832886 |
| 94467850 | 274966 | rs7898054 |
| 94468084 | 275200 | rs11187145 |
| 94468335 | 275451 | rs11187146 |
| 94468644 | 275760 | rs2488081 |
| 94468673 | 275789 | rs2488080 |
| 94469087 | 276203 | rs1112718 |
| 94469812 | 276928 | rs12260097 |
| 94469857 | 276973 | rs34383024 |
| 94470058 | 277174 | rs35816895 |
| 94470314 | 277430 | rs10882106 |
| 94470371 | 277487 | rs2497313 |
| 94470482 | 277598 | rs7086841 |
| 94470666 | 277782 | rs2497312 |
| 94471062 | 278178 | rs9420591 |
| 94471614 | 278730 | rs4933235 |
| 94471897 | 279013 | rs7923837 |
| 94471924 | 279040 | rs10673051 |
| 94471925 | 279041 | rs35275238 |
| 94471968 | 279084 | rs35606816 |
| 94471975 | 279091 | rs2497311 |
| 94472056 | 279172 | rs7923866 |
| 94472115 | 279231 | rs12780253 |
| 94472584 | 279700 | rs35282244 |
| 94473140 | 280256 | rs36026029 |
| 94473357 | 280473 | rs11187147 |
| 94473463 | 280579 | rs2488079 |
| 94473656 | 280772 | rs10529320 |
| 94473689 | 280805 | rs2497310 |
| 94473690 | 280806 | rs2488078 |
| 94473695 | 280811 | rs3221117 |
| 94473956 | 281072 | rs2497309 |
| 94474172 | 281288 | rs870786 |
| 94474324 | 281440 | rs2497308 |
| 94474328 | 281444 | rs2488077 |
| 94474418 | 281534 | rs5787009 |
| 94474440 | 281556 | rs5787010 |
| 94474442 | 281558 | rs5787011 |
| 94474472 | 281588 | rs11187148 |
| 94474486 | 281602 | rs1418390 |
| 94474604 | 281720 | rs2497307 |
| 94474750 | 281866 | rs7081035 |
| 94474783 | 281899 | rs7081294 |
| 94474989 | 282105 | rs7081351 |
| 94475058 | 282174 | rs7081745 |
| 94475060 | 282176 | rs10568596 |
| 94475063 | 282179 | rs7099393 |
| 94475082 | 282198 | rs10665748 |
| 94475086 | 282202 | rs34350311 |
| 94475191 | 282307 | rs2497306 |
| 94475601 | 282717 | rs2497305 |
| 94475656 | 282772 | rs34372918 |
| 94475743 | 282859 | rs11187149 |
| 94476016 | 283132 | rs11597458 |
| 94476061 | 283177 | rs2488076 |
| 94476146 | 283262 | rs11593164 |
| 94476357 | 283473 | rs34848929 |
| 94476358 | 283474 | rs11597547 |
| 94476822 | 283938 | rs11187150 |
| 94477781 | 284897 | rs1544210 |
| 94478596 | 285712 | rs35619602 |
| 94479180 | 286296 | rs10630735 |
| 94479181 | 286297 | rs35097519 |
| 94479192 | 286308 | rs34237492 |
| 94479194 | 286310 | rs11309242 |
| 94480154 | 287270 | rs2488075 |
| 94480323 | 287439 | rs12762754 |
| 94480347 | 287463 | rs11593631 |
| 94480992 | 288108 | rs9730884 |
| 94481595 | 288711 | rs11379031 |
| 94481781 | 288897 | rs10615317 |
| 94481897 | 289013 | rs35598412 |
| 94482696 | 289812 | rs2497304 |
| 94482730 | 289846 | rs9419745 |
| 94482914 | 290030 | rs35849687 |
| 94483045 | 290161 | rs34009238 |
| 94483719 | 290835 | rs2488074 |
| 94484440 | 291556 | rs11187151 |
| 94484498 | 291614 | rs35406218 |
| 94485046 | 292162 | rs34249712 |
| 94485097 | 292213 | rs2497303 |
| 94485259 | 292375 | rs4933738 |
| 94485733 | 292849 | rs947591 |
| 94485978 | 293094 | rs7916355 |
| 94486361 | 293477 | rs2051004 |
| 94488416 | 295532 | rs4933236 |
| 94488811 | 295927 | rs17107841 |
| 94488843 | 295959 | rs33985961 |
| 94488845 | 295961 | rs10578040 |
| 94488955 | 296071 | rs2488073 |
| 94489325 | 296441 | rs2488072 |
| 94489493 | 296609 | rs34209030 |
| 94489557 | 296673 | rs2488071 |
| 94489846 | 296962 | rs7917254 |
| 94490010 | 297126 | rs11318190 |
| 94490015 | 297131 | rs34994435 |
| 94490015 | 297131 | rs10588167 |
| 94490091 | 297207 | rs11187152 |

TABLE 12
SNPs within LD block C17 between positions 66,037,656 and
66,163,076 bp on Chromosome 17 in NCBI build 35 and NCBI Build 36.)

| | Position in | |
|---|---|---|
| Position in | SEQ ID | |
| Build 35/36 | NO: 3 | Marker ID |
| 66037656 | 1 | rs11077501 |
| 66038245 | 590 | rs10445229 |
| 66038446 | 791 | rs8067115 |
| 66038456 | 801 | rs10445230 |
| 66038691 | 1036 | rs10445231 |
| 66039757 | 2102 | rs28569992 |
| 66039800 | 2145 | rs4606755 |
| 66039816 | 2161 | rs4435300 |
| 66039936 | 2281 | rs35154837 |
| 66039942 | 2287 | rs9630701 |
| 66040960 | 3305 | rs12165045 |
| 66040982 | 3327 | rs7359539 |
| 66041088 | 3433 | rs7359543 |
| 66042479 | 4824 | rs365813 |
| 66043002 | 5347 | rs4261590 |
| 66043301 | 5646 | rs7223187 |
| 66043481 | 5826 | rs6146132 |
| 66043562 | 5907 | rs721249 |
| 66043745 | 6090 | rs5821786 |
| 66043746 | 6091 | rs33957619 |
| 66043759 | 6104 | rs5821787 |
| 66043760 | 6105 | rs33961999 |
| 66043764 | 6109 | rs12950870 |
| 66044207 | 6552 | rs350605 |
| 66044302 | 6647 | rs10559381 |
| 66044390 | 6735 | rs11650835 |
| 66044411 | 6756 | rs7209364 |
| 66044489 | 6834 | rs350604 |
| 66044496 | 6841 | rs11657696 |
| 66044614 | 6959 | rs11651554 |
| 66044626 | 6971 | rs11657734 |
| 66045245 | 7590 | rs350603 |
| 66045317 | 7662 | rs2307760 |
| 66045722 | 8067 | rs11653245 |
| 66045948 | 8293 | rs11653355 |
| 66047524 | 9869 | rs34832542 |
| 66047547 | 9892 | rs2567294 |
| 66047580 | 9925 | rs11655558 |
| 66047597 | 9942 | rs184783 |
| 66047621 | 9966 | rs353452 |
| 66047646 | 9991 | rs9897791 |
| 66047700 | 10045 | rs11655611 |
| 66047739 | 10084 | rs1825672 |
| 66047807 | 10152 | rs35941755 |
| 66047887 | 10232 | rs9896649 |
| 66048278 | 10623 | rs34984463 |
| 66048288 | 10633 | rs11374691 |
| 66048300 | 10645 | rs11868103 |
| 66048450 | 10795 | rs7220610 |
| 66048799 | 11144 | rs7216368 |
| 66048942 | 11287 | rs16913 |
| 66049292 | 11637 | rs34941209 |
| 66049692 | 12037 | rs8069108 |
| 66049716 | 12061 | rs420762 |
| 66050080 | 12425 | rs2630640 |
| 66050452 | 12797 | rs34793380 |
| 66050707 | 13052 | rs1817630 |
| 66050903 | 13248 | rs11077502 |
| 66050915 | 13260 | rs7218450 |
| 66051172 | 13517 | rs411602 |
| 66051859 | 14204 | rs16975882 |
| 66051914 | 14259 | rs41450951 |
| 66052282 | 14627 | rs17780198 |
| 66052347 | 14692 | rs10512540 |
| 66052398 | 14743 | rs2630639 |
| 66052474 | 14819 | rs4793432 |
| 66052546 | 14891 | rs34696190 |
| 66052699 | 15044 | rs12952273 |
| 66053325 | 15670 | rs350612 |
| 66053541 | 15886 | rs1284043 |
| 66053695 | 16040 | rs1298182 |
| 66053988 | 16333 | rs1092528 |
| 66054007 | 16352 | rs1091892 |
| 66054019 | 16364 | rs1092390 |
| 66054025 | 16370 | rs1092391 |
| 66054076 | 16421 | rs276805 |
| 66054488 | 16833 | rs164784 |
| 66055098 | 17443 | rs164785 |
| 66056158 | 18503 | rs350611 |
| 66057036 | 19381 | rs9736449 |
| 66057065 | 19410 | rs1161565 |
| 66057065 | 19410 | rs350610 |
| 66057184 | 19529 | rs36160618 |
| 66057341 | 19686 | rs28835946 |
| 66057721 | 20066 | rs350609 |
| 66057907 | 20252 | rs36143257 |
| 66058061 | 20406 | rs164786 |
| 66058223 | 20568 | rs4506943 |
| 66058544 | 20889 | rs164787 |
| 66058598 | 20943 | rs35063328 |
| 66058616 | 20961 | rs35629111 |
| 66058724 | 21069 | rs35654390 |
| 66058733 | 21078 | rs350608 |
| 66058804 | 21149 | rs589894 |
| 66059113 | 21458 | rs512280 |
| 66059121 | 21466 | rs512274 |
| 66059131 | 21476 | rs512241 |
| 66059267 | 21612 | rs35813361 |
| 66059431 | 21776 | rs34292805 |
| 66060049 | 22394 | rs671190 |
| 66060102 | 22447 | rs671117 |
| 66060111 | 22456 | rs35419562 |
| 66060172 | 22517 | rs8080393 |
| 66060192 | 22537 | rs509784 |
| 66060244 | 22589 | rs509924 |
| 66060364 | 22709 | rs510865 |
| 66060367 | 22712 | rs669895 |
| 66060401 | 22746 | rs8075249 |
| 66060403 | 22748 | rs8080759 |
| 66060407 | 22752 | rs511552 |
| 66060416 | 22761 | rs511578 |
| 66060618 | 22963 | rs11326414 |
| 66061168 | 23513 | rs350607 |
| 66061287 | 23632 | rs8081864 |
| 66061435 | 23780 | rs8066762 |
| 66063324 | 25669 | rs10048191 |
| 66063794 | 26139 | rs34162560 |
| 66063983 | 26328 | rs350606 |
| 66064178 | 26523 | rs8078924 |
| 66065291 | 27636 | rs4793451 |
| 66065798 | 28143 | rs350613 |
| 66066258 | 28603 | rs10432003 |
| 66066436 | 28781 | rs350614 |
| 66066465 | 28810 | rs34703743 |
| 66066481 | 28826 | rs35908278 |
| 66066608 | 28953 | rs11654062 |
| 66067303 | 29648 | rs350615 |
| 66067453 | 29798 | rs16975891 |
| 66067482 | 29827 | rs17823280 |
| 66067699 | 30044 | rs350616 |
| 66068320 | 30665 | rs350617 |
| 66068798 | 31143 | rs1991680 |
| 66069274 | 31619 | rs9896037 |
| 66069554 | 31899 | rs16975893 |
| 66069880 | 32225 | rs8081551 |
| 66070068 | 32413 | rs11654475 |
| 66071319 | 33664 | rs11651609 |
| 66071575 | 33920 | rs34132957 |
| 66071603 | 33948 | rs12603169 |
| 66071721 | 34066 | rs8073324 |
| 66072276 | 34621 | rs1431455 |
| 66072384 | 34729 | rs17763769 |
| 66073012 | 35357 | rs350618 |
| 66073300 | 35645 | rs1991679 |
| 66073592 | 35937 | rs34134043 |
| 66073862 | 36207 | rs7208933 |
| 66074000 | 36345 | rs11655478 |
| 66074367 | 36712 | rs35062489 |
| 66074796 | 37141 | rs9900305 |
| 66075575 | 37920 | rs16975908 |
| 66076138 | 38483 | rs7224554 |
| 66076400 | 38745 | rs35795750 |
| 66076402 | 38747 | rs5821788 |
| 66076579 | 38924 | rs350619 |
| 66076797 | 39142 | rs34028570 |
| 66076805 | 39150 | rs5821789 |
| 66076806 | 39151 | rs35251724 |
| 66077103 | 39448 | rs7210525 |
| 66077477 | 39822 | rs2567296 |
| 66077488 | 39833 | rs1843621 |
| 66077930 | 40275 | rs34077265 |
| 66077984 | 40329 | rs528669 |
| 66078111 | 40456 | rs8067160 |
| 66078127 | 40472 | rs350620 |
| 66078527 | 40872 | rs191621 |
| 66079419 | 41764 | rs350621 |
| 66079437 | 41782 | rs350622 |
| 66079660 | 42005 | rs12452538 |
| 66079935 | 42280 | rs17176093 |
| 66079969 | 42314 | rs350623 |
| 66079990 | 42335 | rs11077503 |
| 66080024 | 42369 | rs11077504 |
| 66080067 | 42412 | rs350624 |
| 66080672 | 43017 | rs35072892 |
| 66080920 | 43265 | rs11657749 |
| 66080984 | 43329 | rs16975914 |
| 66081110 | 43455 | rs34693986 |
| 66081370 | 43715 | rs350625 |
| 66081556 | 43901 | rs818765 |
| 66081568 | 43913 | rs415298 |
| 66081576 | 43921 | rs376750 |
| 66081612 | 43957 | rs10652573 |
| 66081700 | 44045 | rs350626 |
| 66082086 | 44431 | rs28590672 |
| 66083526 | 45871 | rs16975922 |
| 66083670 | 46015 | rs481417 |
| 66083783 | 46128 | rs191622 |
| 66083825 | 46170 | rs482515 |
| 66083858 | 46203 | rs367218 |
| 66083931 | 46276 | rs402214 |
| 66084484 | 46829 | rs483543 |
| 66084515 | 46860 | rs484253 |
| 66084734 | 47079 | rs486202 |
| 66084769 | 47114 | rs610662 |
| 66084772 | 47117 | rs11310950 |
| 66084781 | 47126 | rs12936985 |
| 66084782 | 47127 | rs12945927 |
| 66084808 | 47153 | rs610730 |
| 66084932 | 47277 | rs1825669 |
| 66084935 | 47280 | rs1825670 |
| 66084954 | 47299 | rs1825671 |
| 66085342 | 47687 | rs8077690 |
| 66085473 | 47818 | rs12602288 |
| 66086152 | 48497 | rs16975937 |
| 66086744 | 49089 | rs28694321 |
| 66087301 | 49646 | rs35353185 |
| 66087527 | 49872 | rs41486747 |
| 66087994 | 50339 | rs718950 |
| 66088026 | 50371 | rs718951 |
| 66089255 | 51600 | rs11654235 |
| 66089418 | 51763 | rs11077506 |
| 66090535 | 52880 | rs1431454 |
| 66090620 | 52965 | rs5821790 |
| 66090782 | 53127 | rs1367748 |
| 66090958 | 53303 | rs12603995 |
| 66091042 | 53387 | rs16975939 |
| 66091117 | 53462 | rs11434683 |
| 66091324 | 53669 | rs8081186 |
| 66091594 | 53939 | rs149309 |
| 66091687 | 54032 | rs184806 |
| 66091693 | 54038 | rs149380 |
| 66091704 | 54049 | rs151727 |
| 66091719 | 54064 | rs189541 |
| 66091741 | 54086 | rs11651021 |
| 66091844 | 54189 | rs416121 |
| 66091912 | 54257 | rs9302918 |
| 66092080 | 54425 | rs9302919 |
| 66092700 | 55045 | rs35618929 |
| 66092813 | 55158 | rs35870620 |
| 66092904 | 55249 | rs11652089 |
| 66093601 | 55946 | rs12938026 |
| 66093669 | 56014 | rs12948379 |
| 66094196 | 56541 | rs9911671 |
| 66094376 | 56721 | rs16975941 |
| 66094422 | 56767 | rs7220885 |
| 66094832 | 57177 | rs601297 |
| 66094858 | 57203 | rs601615 |
| 66094862 | 57207 | rs601617 |
| 66094892 | 57237 | rs601656 |
| 66095313 | 57658 | rs418402 |
| 66096181 | 58526 | rs35417478 |
| 66097168 | 59513 | rs16975944 |
| 66097631 | 59976 | rs34913709 |
| 66097633 | 59978 | rs9894781 |
| 66097634 | 59979 | rs9914075 |
| 66097640 | 59985 | rs11658937 |
| 66097733 | 60078 | rs8078784 |
| 66097760 | 60105 | rs9915992 |
| 66098070 | 60415 | rs10634138 |
| 66098071 | 60416 | rs34728014 |
| 66098073 | 60418 | rs34864826 |
| 66098076 | 60421 | rs10551730 |
| 66098084 | 60429 | rs5821791 |
| 66098085 | 60430 | rs34310496 |
| 66098092 | 60437 | rs34563419 |
| 66098173 | 60518 | rs7503632 |
| 66098597 | 60942 | rs9902449 |
| 66098928 | 61273 | rs9894881 |
| 66098930 | 61275 | rs9894882 |
| 66098976 | 61321 | rs11656877 |
| 66099163 | 61508 | rs5821792 |
| 66099494 | 61839 | rs16975946 |
| 66099600 | 61945 | rs17779190 |
| 66099816 | 62161 | rs11650015 |
| 66100055 | 62400 | rs10607347 |
| 66100062 | 62407 | rs11372958 |
| 66100081 | 62426 | rs34073356 |
| 66100089 | 62434 | rs36104345 |
| 66100401 | 62746 | rs2109051 |
| 66100605 | 62950 | rs2159312 |
| 66101242 | 63587 | rs990043 |
| 66101267 | 63612 | rs576754 |
| 66101396 | 63741 | rs2035582 |
| 66101665 | 64010 | rs9905624 |
| 66101895 | 64240 | rs693914 |
| 66102064 | 64409 | rs558507 |
| 66102168 | 64513 | rs35142117 |
| 66102168 | 64513 | rs10596869 |
| 66102213 | 64558 | rs560206 |
| 66102221 | 64566 | rs12949221 |
| 66102269 | 64614 | rs560368 |
| 66102315 | 64660 | rs1911969 |
| 66102441 | 64786 | rs35550717 |
| 66102450 | 64795 | rs34779818 |
| 66102555 | 64900 | rs9892329 |
| 66102591 | 64936 | rs11658215 |
| 66102896 | 65241 | rs35815207 |
| 66103027 | 65372 | rs9914225 |
| 66103236 | 65581 | rs9894021 |
| 66103495 | 65840 | rs9891523 |
| 66103561 | 65906 | rs720877 |
| 66103923 | 66268 | rs720876 |
| 66103928 | 66273 | rs35174251 |
| 66104116 | 66461 | rs9892968 |
| 66104437 | 66782 | rs17779357 |
| 66104493 | 66838 | rs34287249 |
| 66105315 | 67660 | rs3042758 |
| 66105827 | 68172 | rs1872599 |
| 66106415 | 68760 | rs7218838 |
| 66106622 | 68967 | rs7209535 |
| 66106911 | 69256 | rs9896809 |
| 66107082 | 69427 | rs28507887 |
| 66107150 | 69495 | rs8067542 |
| 66107151 | 69496 | rs10641487 |
| 66107152 | 69497 | rs33989506 |
| 66107167 | 69512 | rs8081487 |
| 66108291 | 70636 | rs4793495 |
| 66108545 | 70890 | rs8073162 |
| 66108565 | 70910 | rs8072591 |
| 66108901 | 71246 | rs9905537 |
| 66108905 | 71250 | rs8073114 |
| 66108924 | 71269 | rs8072003 |
| 66108980 | 71325 | rs35155940 |
| 66108991 | 71336 | rs11459300 |
| 66108997 | 71342 | rs36029337 |
| 66109457 | 71802 | rs11656223 |
| 66110309 | 72654 | rs6501400 |
| 66110507 | 72852 | rs8074266 |
| 66110586 | 72931 | rs388304 |
| 66110881 | 73226 | rs4544280 |
| 66111138 | 73483 | rs12601471 |
| 66111335 | 73680 | rs12603574 |
| 66111468 | 73813 | rs11077507 |
| 66111545 | 73890 | rs11077508 |
| 66111926 | 74271 | rs28546453 |
| 66112148 | 74493 | rs412877 |
| 66112202 | 74547 | rs391223 |
| 66112205 | 74550 | rs7224183 |
| 66112227 | 74572 | rs173318 |
| 66112234 | 74579 | rs192147 |
| 66112749 | 75094 | rs34361437 |
| 66113023 | 75368 | rs12449913 |
| 66114764 | 77109 | rs28496807 |
| 66114858 | 77203 | rs7220084 |
| 66114926 | 77271 | rs7224857 |
| 66115366 | 77711 | rs7221542 |
| 66115371 | 77716 | rs7221545 |
| 66115377 | 77722 | rs34466876 |
| 66115416 | 77761 | rs10610236 |
| 66115835 | 78180 | rs1979538 |
| 66116621 | 78966 | rs8067103 |
| 66116703 | 79048 | rs7216053 |
| 66116880 | 79225 | rs12949351 |
| 66117903 | 80248 | rs9913650 |
| 66117911 | 80256 | rs1860316 |
| 66118086 | 80431 | rs9914115 |
| 66118200 | 80545 | rs9908443 |
| 66118485 | 80830 | rs8079029 |
| 66118495 | 80840 | rs12601922 |
| 66118737 | 81082 | rs10545098 |
| 66118737 | 81082 | rs12603987 |
| 66119589 | 81934 | rs9897225 |
| 66119616 | 81961 | rs35975623 |
| 66119642 | 81987 | rs9895773 |
| 66119822 | 82167 | rs9898518 |
| 66119823 | 82168 | rs28422091 |
| 66119823 | 82168 | rs36094553 |
| 66119863 | 82208 | rs3220372 |
| 66119992 | 82337 | rs41408048 |
| 66120631 | 82976 | rs28373290 |
| 66120827 | 83172 | rs41459950 |
| 66121181 | 83526 | rs36013413 |
| 66121413 | 83758 | rs10564191 |
| 66121468 | 83813 | rs7221715 |
| 66121873 | 84218 | rs12940023 |
| 66122077 | 84422 | rs4019476 |
| 66122410 | 84755 | rs7222670 |
| 66122508 | 84853 | rs7211934 |
| 66122635 | 84980 | rs7212243 |
| 66122801 | 85146 | rs11655139 |
| 66123046 | 85391 | rs4793317 |
| 66123283 | 85628 | rs171384 |
| 66123342 | 85687 | rs4793496 |
| 66123566 | 85911 | rs507683 |
| 66123595 | 85940 | rs507607 |
| 66123682 | 86027 | rs41528454 |
| 66123714 | 86059 | rs41381246 |
| 66123879 | 86224 | rs192146 |
| 66123955 | 86300 | rs34149626 |
| 66123959 | 86304 | rs35260054 |
| 66125089 | 87434 | rs9908077 |
| 66125154 | 87499 | rs11077509 |
| 66125233 | 87578 | rs35234488 |
| 66125360 | 87705 | rs11871352 |
| 66125993 | 88338 | rs7209850 |
| 66126471 | 88816 | rs421333 |
| 66126699 | 89044 | rs413073 |
| 66126766 | 89111 | rs2035581 |
| 66126795 | 89140 | rs392974 |
| 66126799 | 89144 | rs28532132 |
| 66126840 | 89185 | rs3931227 |
| 66126841 | 89186 | rs16975961 |
| 66126875 | 89220 | rs532348 |
| 66127256 | 89601 | rs11867791 |
| 66127283 | 89628 | rs11871014 |
| 66127312 | 89657 | rs34866225 |
| 66127313 | 89658 | rs35958830 |
| 66128191 | 90536 | rs9904090 |
| 66128304 | 90649 | rs16975968 |
| 66129127 | 91472 | rs9911708 |
| 66129806 | 92151 | rs34448828 |
| 66129814 | 92159 | rs11398461 |
| 66130210 | 92555 | rs9907685 |
| 66130284 | 92629 | rs9914666 |
| 66130455 | 92800 | rs17717654 |
| 66131911 | 94256 | rs16975970 |
| 66131995 | 94340 | rs1981646 |
| 66132156 | 94501 | rs11656723 |
| 66132225 | 94570 | rs16975976 |
| 66132788 | 95133 | rs1981647 |
| 66133032 | 95377 | rs16975979 |
| 66133370 | 95715 | rs16975981 |
| 66134231 | 96576 | rs9909661 |
| 66134831 | 97176 | rs9890554 |
| 66135283 | 97628 | rs11077510 |
| 66135627 | 97972 | rs9302920 |
| 66135758 | 98103 | rs34975186 |
| 66136201 | 98546 | rs11870545 |
| 66136484 | 98829 | rs9906234 |
| 66136910 | 99255 | rs10621796 |
| 66136920 | 99265 | rs11328278 |
| 66136922 | 99267 | rs11328279 |
| 66137329 | 99674 | rs35402203 |
| 66137331 | 99676 | rs6501401 |
| 66137347 | 99692 | rs10596163 |
| 66137437 | 99782 | rs35029611 |
| 66137784 | 100129 | rs35985303 |
| 66137798 | 100143 | rs10595957 |
| 66137965 | 100310 | rs10221271 |
| 66138452 | 100797 | rs10221225 |
| 66138713 | 101058 | rs34005576 |
| 66139441 | 101786 | rs9913463 |
| 66139476 | 101821 | rs9915148 |
| 66139800 | 102145 | rs11650683 |
| 66140108 | 102453 | rs34335723 |
| 66140414 | 102759 | rs11654495 |
| 66141319 | 103664 | rs35607820 |
| 66141543 | 103888 | rs12601304 |
| 66141933 | 104278 | rs1486290 |
| 66142011 | 104356 | rs12452862 |
| 66142106 | 104451 | rs35317540 |
| 66142226 | 104571 | rs11077511 |
| 66142325 | 104670 | rs35278774 |
| 66142329 | 104674 | rs7216457 |
| 66142581 | 104926 | rs11077512 |
| 66142607 | 104952 | rs35634443 |
| 66142648 | 104993 | rs11454851 |
| 66142729 | 105074 | rs11654670 |
| 66142794 | 105139 | rs34926966 |
| 66143200 | 105545 | rs8078302 |
| 66143897 | 106242 | rs562472 |
| 66144028 | 106373 | rs28420303 |
| 66144129 | 106474 | rs28542473 |
| 66144170 | 106515 | rs28526433 |
| 66144232 | 106577 | rs12185220 |
| 66144972 | 107317 | rs7350903 |
| 66145018 | 107363 | rs7350904 |
| 66145022 | 107367 | rs7350905 |
| 66145067 | 107412 | rs35353467 |
| 66145660 | 108005 | rs16975985 |
| 66145765 | 108110 | rs16975987 |
| 66145912 | 108257 | rs412981 |
| 66145914 | 108259 | rs412980 |
| 66145925 | 108270 | rs9907746 |
| 66146236 | 108581 | rs432688 |
| 66146640 | 108985 | rs540331 |
| 66146722 | 109067 | rs473792 |
| 66146816 | 109161 | rs2630644 |
| 66146912 | 109257 | rs12949591 |
| 66146954 | 109299 | rs2109053 |
| 66147095 | 109440 | rs35296857 |
| 66147167 | 109512 | rs17791270 |
| 66147246 | 109591 | rs16975989 |
| 66147343 | 109688 | rs17791282 |
| 66147436 | 109781 | rs17718124 |
| 66147660 | 110005 | rs16975993 |
| 66147678 | 110023 | rs35106633 |
| 66147754 | 110099 | rs34429407 |
| 66147913 | 110258 | rs2240749 |
| 66147960 | 110305 | rs16975998 |
| 66148045 | 110390 | rs3217050 |
| 66148046 | 110391 | rs2240750 |
| 66148178 | 110523 | rs16976000 |
| 66148512 | 110857 | rs16976002 |
| 66148962 | 111307 | rs189580 |
| 66149102 | 111447 | rs1843622 |
| 66149149 | 111494 | rs543765 |
| 66149213 | 111558 | rs434729 |
| 66149222 | 111567 | rs375709 |
| 66149257 | 111602 | rs11656782 |
| 66149348 | 111693 | rs11653519 |
| 66149386 | 111731 | rs190256 |
| 66149859 | 112204 | rs4584866 |
| 66150283 | 112628 | rs16976008 |
| 66150360 | 112705 | rs16976009 |
| 66150511 | 112856 | rs16976011 |
| 66150609 | 112954 | rs17718380 |
| 66150898 | 113243 | rs11652208 |
| 66150909 | 113254 | rs11652209 |
| 66151294 | 113639 | rs10491179 |
| 66151858 | 114203 | rs16976019 |
| 66152747 | 115092 | rs35499697 |
| 66152804 | 115149 | rs17791650 |
| 66152863 | 115208 | rs16976023 |
| 66152963 | 115308 | rs16976024 |
| 66152998 | 115343 | rs9891997 |
| 66153185 | 115530 | rs12942978 |
| 66153557 | 115902 | rs16976027 |
| 66153631 | 115976 | rs17718538 |
| 66154056 | 116401 | rs16976031 |
| 66155045 | 117390 | rs34736208 |
| 66155048 | 117393 | rs12952540 |
| 66155070 | 117415 | rs34389302 |
| 66155101 | 117446 | rs189581 |
| 66155303 | 117648 | rs9910837 |
| 66155784 | 118129 | rs17718586 |
| 66156561 | 118906 | rs544680 |
| 66156593 | 118938 | rs8066818 |
| 66157022 | 119367 | rs408448 |
| 66157073 | 119418 | rs11650843 |
| 66157111 | 119456 | rs367742 |
| 66157179 | 119524 | rs550945 |
| 66157197 | 119542 | rs183590 |
| 66157224 | 119569 | rs551058 |
| 66157327 | 119672 | rs34098284 |
| 66157893 | 120238 | rs183591 |
| 66157917 | 120262 | rs183059 |
| 66157976 | 120321 | rs404774 |
| 66158027 | 120372 | rs11657329 |
| 66158091 | 120436 | rs405068 |
| 66158109 | 120454 | rs35166389 |
| 66158247 | 120592 | rs16976038 |
| 66158414 | 120759 | rs183592 |
| 66159001 | 121346 | rs34458687 |
| 66159262 | 121607 | rs35760966 |
| 66159416 | 121761 | rs2191113 |
| 66159464 | 121809 | rs5821793 |
| 66159546 | 121891 | rs5821794 |
| 66159547 | 121892 | rs35222039 |
| 66159556 | 121901 | rs10648023 |
| 66159562 | 121907 | rs3048626 |
| 66159637 | 121982 | rs8072436 |
| 66159764 | 122109 | rs2215270 |
| 66159891 | 122236 | rs16976043 |
| 66160076 | 122421 | rs8074760 |
| 66160292 | 122637 | rs11657599 |
| 66160331 | 122676 | rs34281212 |
| 66160370 | 122715 | rs36074213 |
| 66160438 | 122783 | rs171385 |
| 66160451 | 122796 | rs412353 |
| 66160480 | 122825 | rs422923 |
| 66160492 | 122837 | rs11654012 |
| 66160668 | 123013 | rs35429609 |
| 66160721 | 123066 | rs2367004 |
| 66161977 | 124322 | rs35222003 |
| 66161994 | 124339 | rs11867678 |
| 66162691 | 125036 | rs12953137 |
| 66162852 | 125197 | rs10642929 |
| 66162854 | 125199 | rs34937331 |
| 66162869 | 125214 | rs10585639 |
| 66163076 | 125421 | rs4793497 |
| 66037656 | 1 | rs11077501 |
| 66038245 | 590 | rs10445229 |
| 66038446 | 791 | rs8067115 |
| 66038456 | 801 | rs10445230 |
| 66038691 | 1036 | rs10445231 |
| 66039757 | 2102 | rs28569992 |
| 66039800 | 2145 | rs4606755 |
| 66039816 | 2161 | rs4435300 |
| 66039936 | 2281 | rs35154837 |

TABLE 13
Key to Sequence listing provided herein.

| SEQ ID NO | Name |
|---|---|
| 1 | LD block C06 |
| 2 | LD block C10 |
| 3 | LD block C17 |
| 4 | rs10882091 |
| 5 | rs1111875 |
| 6 | rs1569699 |
| 7 | rs17763769 |
| 8 | rs17763811 |
| 9 | rs1843622 |
| 10 | rs1860316 |
| 11 | rs1981647 |
| 12 | rs1999763 |
| 13 | rs2191113 |
| 14 | rs2275729 |
| 15 | rs2421943 |
| 16 | rs2497304 |
| 17 | rs3829170 |
| 18 | rs4712527 |
| 19 | rs6583826 |
| 20 | rs6583830 |
| 21 | rs7756992 |
| 22 | rs7758851 |
| 23 | rs7908111 |
| 24 | rs7914814 |
| 25 | rs7915186 |
| 26 | rs7917359 |
| 27 | rs7922112 |
| 28 | rs7923837 |
| 29 | rs9295478 |
| 30 | rs947591 |
| 31 | rs9890889 |
| 32 | rs7752906 |
| 33 | rs9350271 |
| 34 | rs9356744 |
| 35 | rs9368222 |
| 36 | rs10440833 |
| 37 | rs6931514 |
| 38 | rs2009802 |
| 39 | rs17718938 |
| 40 | rs17223216 |
| 41 | rs2109050 |
| 42 | rs1962801 |
| 43 | rs7086285 |
| 44 | rs17234378 |

### Example 2

### Variants in the CDKAL1 Gene Influence Insulin Response and the Risk of Type 2 Diabetes

[0268] We have recently described a variant in TCF7L2 associated to T2D (Grant, S. F. et al. Nat Genet 38, 320-3 (2006); Helgason, A. et al. Nat Genet (2007)). In the following, we describe a genome-wide association study on Icelandic T2D patients, using the Illumina Hap300 chip. We individually tested 313,179 SNPs for association to T2D in a sample of 1399 T2D patients and 5275 controls. We further tested 339,846 two-marker haplotypes identified as efficient surrogates (r²>0.8) for a set of SNPs which were not included on the Hap300 chip but were typed in the HapMap project (Pe'er, I. et al. Nat Genet 38, 663-7 (2006)). In addition to analyzing the entire group of T2D patients we separately tested 700 non-obese T2D patients and 531 obese T2D patients for association. Overall, a total of 1,959,075 (653,025 variants×3 phenotypes) tests were performed. The results were adjusted for relatedness between individuals and potential population stratification by genomic control (Devlin, B. & Roeder, K. Biometrics 55, 997-1004 (1999)) (see Methods). Specifically, the (unadjusted) chi-square statistics were divided by 1.287, 1.204 and 1.184 respectively for the analyses of all, non-obese and obese T2D cases. A previously identified SNP rs7903146 in the TCF7L2 gene gave the most significant results with OR=1.38 and P=1.82×10⁻¹⁰ in all T2D patients. Although no other SNP or haplotype was significant after adjustment for the number of tests performed, more borderline significant signals were observed than expected by chance alone (FIG. 4). Hence we decided to further pursue the top signals.

### Methods

### Icelandic Study Population

[0269] The Icelandic T2D group has been described previously (Reynisdottir, I. et al. Am J Hum Genet 73, 323-35 (2003)). A total of 1500 T2D patients were recruited for this genome-wide association study, using the Infinium II assay method and the Sentrix HumanHap300 BeadChip (Illumina, San Diego, Calif., USA). Thereof, 1399 were successfully genotyped according to our quality control criteria (see Supplementary Methods) and used in the present case control-analysis; 531 of the genotyped cases were obese (BMI≧30). The controls used in this study consisted of 599 controls randomly selected from the Icelandic genealogical database and 4676 individuals from other ongoing genome-wide association studies at deCODE. The study was approved by the Data Protection Commission of Iceland and the National Bioethics Committee of Iceland. Written informed consent was obtained from all cases and controls.

### Other Study Populations

[0270] The Danish female study group of 282 cases and 629 controls, herein termed Denmark A, was selected from the Prospective Epidemiological Risk Factor (PERF) study in Denmark (Tanko, L. B., et al. Bone 32, 8-14 (2003)). This is a group of postmenopausal women who took part in various screening placebo-controlled clinical trials and epidemiological studies performed at the Center for Clinical and Basic Research. At a follow-up examination of 5847 women in 2000-2001 medical history including diabetes type I and type II, family history, and current or previous long-term use of drugs were gathered during personal interviews using a preformed questionnaire. If subject was diagnosed as diabetes of either type I or type II, the time of diagnosis or treatment was also collected. The study was approved by the Ethical Committee of Copenhagen County and was in accordance with the principles of the Helsinki Declaration.

[0271] The second Danish study population of 1359 T2D cases and 4858 control individuals with normal glucose tolerance was from the Steno Diabetes Center in Copenhagen and from the Inter99 population-based sample of 30- to 60-year-old individuals living in the greater Copenhagen area and sampled at Research Centre for Prevention and Health (Jorgensen, T. et al. Eur J Cardiovasc Prev Rehabil 10, 377-86 (2003)). This dataset is referred to in the text as Denmark B. Diabetes and pre-diabetes categories were diagnosed according to the 1999 World Health Organization (WHO) criteria. An oral glucose tolerance test was performed on participants in the Inter99 study as described (Jorgensen, T. et al. Eur J Cardiovasc Prey Rehabil 10, 377-86 (2003)). Informed written consent was obtained from all subjects before participation. The study was approved by the Ethical Committee of Copenhagen County and was in accordance with the principles of the Helsinki Declaration.

[0272] The Philadelphia study population consisted of 468 T2D cases and 1024 control individuals. The study population was selected from the PENN CATH study, a cross-sectional study of the association of biochemical and genetic factors to coronary atherosclerosis in a study population of consecutive individuals undergoing cardiac catheterization at the University of Pennsylvania Medical Center. T2D was defined as a history of fasting blood glucose≧126 mg dl⁻¹, 2 h postprandial glucose≧200 mg dl⁻¹, use of oral hypoglycemic agents, or use of insulin and oral hypoglycemic in a subject older than age 40. The University of Pennsylvania Institutional Review Board approved the study protocol, and all subjects gave written informed consent. All cases and controls were of European ancestry. Ethnicity was determined through self-report.

[0273] The Dutch Breda study population consisted of 370 T2D cases and 916 control individuals. The cases were recruited in 1998-1999 in collaboration with the Diabetes Service Breda and 80 general practitioners from the region around Breda. All patients are diagnosed according to WHO criteria (plasma glucose levels>11.1 mmol/l or a fasting plasma glucose level≧7.0 mmol/l), and undergo clinical and laboratory evaluations for their diabetes at regular 3-month intervals. The Medical Ethics Committee of the University Medical Centre in Utrecht approved the study protocol. All probands filled out an informed consent and a questionnaire on clinical data, including their diabetes related medication, height and weight at present and at the age of 20 year. The controls are Dutch blood bank donors with an average age of 48.

[0274] The Scottish study population consisted of type 2 diabetic cases and non-diabetic controls from the Wellcome Trust UK T2D case-control collection (Go-DARTS2) which is a sub-study of Diabetes Audit and Research Tayside (DARTS) (Morris, A. D. et al. BMJ 315, 524-8 (1997)). All T2D patients were physician-diagnosed T2D cases recruited at primary or secondary care diabetes clinics, or invited to participate from primary care registers and have not been characterized for GAD anti-bodies or MODY gene mutations. The controls were invited to participate through the primary care physicians or through their workplace occupational health departments. Controls did not have a previous diagnosis of diabetes, but the glucose tolerance status of the controls is unknown. All individuals in this ongoing study were recruited in Tayside between October 2004 and July 2006. This study was approved by the Tayside Medical Ethics Committee and informed consent was obtained from all subjects.

[0275] All subjects in the Hong Kong study population were of southern Han Chinese ancestry residing in Hong Kong. The cases consisted of 1500 individuals with T2D selected from the Prince of Wales Hospital Diabetes Registry. Of these, 682 patients had young-onset diabetes (age-at-diagnosis≦40 years) with positive family history. An additional 818 cases were randomly selected from the same registry. The controls consisted of 1000 subjects with normal glucose tolerance (fasting plasma glucose<6.1 mmol/l). Of these, 617 were recruited from the general population participating in a community-based cardiovascular risk screening program as well as hospital staff. In addition, 383 subjects were recruited from a cardiovascular risk screening program for adolescents. Informed consent was obtained for each participating subject. This study was approved by the Clinical Research Ethics Committee of the Chinese University of Hong Kong.

[0276] The African study population comes from the Africa America Diabetes Mellitus study, which was originally designed as an affected sibling pair study with enrollment of available spouses as controls. It has since been expanded to include other family members of the affected pairs and population controls. Recruitment strategies and eligibility criteria for the families enrolled in this report have been described previously (Rotimi, C. N. et al. Ann Epidemiol 11, 51-8 (2001)). This West African case-control series consisted of individuals from the Yoruba (233 affected individuals, 432 controls) and Igbo (237 affected individuals, 276 controls) groups from Nigeria and the Akan (257 affected individuals, 248 controls), Ewe (22 affected individuals, 30 controls) and Gaa-Adangbe (123 affected individuals, 141 controls) groups from Ghana.

[0277] With the exception of the Scottish Go-DARTS study population the DNA used for genotyping in all replication study populations was the product of whole-genome amplification (GenomiPhi Amplification kit, Amersham) of DNA isolated from the peripheral blood.

### Statistical Analysis

[0278] Illumina Genome-Wide Genotyping. All Icelandic case- and control-samples were assayed with the Infinium HumanHap300 SNP chips (Illumina, San Diego, Calif., USA), containing 317,503 haplotype tagging SNPs derived from phase I of the International HapMap project. Of the SNPs assayed on the chip, 4,324 SNPs were excluded as the had (a) yield lower than 95% in cases or controls; (b) minor allele frequency less than 1% in the population; or (c) showed significant distortion from Hardy-Weinberg equilibrium in the controls (P-value<0.001). Any samples with a call rate below 98% were excluded from the analysis. Thus, the final analyses presented in the text utilizes 313,179 SNPs.
Single SNP genotyping. Single SNP genotyping for all population studied, except for the Scottish Go-DARTS population, was carried out at deCODE Genetics in Reykjavik, Iceland by the Centaurus (Nanogen) platform (Kutyavin, I. V. et al. Nucleic Acids Res 34, e128 (2006)). The quality of each Centaurus SNP assay was evaluated by genotyping each assay in the CEU and/or YRI HapMap samples and comparing the results with the HapMap data. Assays with >1.5% mismatch rate were not used and a linkage disequilibrium (LD) test was used for markers known to be in LD. Single SNP genotyping for the Scottish population was carried out at the Biomedical Research Centre, Ninewells Hospital and Medical School, Dundee, Scotland, by the TaqMan® method.
Association analysis. For association analysis we utilized a standard likelihood ratio statistics, implemented in the NEMO software (Gretarsdottir, S. et al. Nat Genet 35, 131-8 (2003)) to calculate two-sided p-values and allele specific OR for each individual allele, assuming a multiplicative model for risk, i.e., that the risks of the two alleles a person carries multiply. Allelic frequencies, rather than carrier frequencies are presented for the markers, and p-values are given after adjustment for the relatedness of the subjects. When estimating genotype specific OR (Table 19) genotype frequencies in the population were estimated assuming HWE.

[0279] In general, allele/haplotype frequencies are estimated by maximum likelihood and tests of differences between cases and controls are performed using a generalized likelihood ratio test (Rice, J. A. Mathematical Statistics and Data Analysis, (Wadsworth Inc., Belmont, Calif., 1995)). This method is particularly useful in situations where there are some missing genotypes for the marker of interest and genotypes of another marker, which is in strong LD with the marker of interest, are used to provide some partial information. This was used in the association tests presented in Table 17 to ensure that the comparison of the highly correlated markers was done using the same number of individuals. To handle uncertainties with phase and missing genotypes, maximum likelihood estimates, likelihood ratios and p-values are computed directly for the observed data, and hence the loss of information due to uncertainty in phase and missing genotypes is automatically captured by the likelihood ratios.

[0280] Results from multiple case-control groups were combined using a Mantel-Haenszel model (Mantel, N. & Haenszel, W. J Natl Cancer Inst 22, 719-48 (1959)) in which the groups were allowed to have different population frequencies for alleles, and genotypes but were assumed to have common relative risks.

Correction for relatedness of the subjects and Genomic Control. Some of the individuals in both the Icelandic patient and control groups are related to each other, causing the chi-square test statistic to have a mean>1 and median>0.675². We estimated the inflation factor by calculating the average of the 653,025 chi-square statistics, which was a method of genomic control⁴ to adjust for both relatedness and potential population stratification. The inflation factor was estimated as 1.287, 1.204 and 1.184, for the analysis of all, non-obese and obese T2D cases, respectively. The results presented are based on adjusting the chi-square statistics by dividing each of them by the corresponding inflation factor.
Quantitative analysis. Data from oral glucose tolerance test on individuals from the Danish Inter99 study were used to calculate insulin secretion as corrected insulin response (CIR) using the following equation: (100×insulin at 30 minutes)÷[glucose at 30 minutes×(glucose at 30 minutes−3.89 mmol)]. Insulin sensitivity was estimated as the reciprocal of the insulin resistance according to the homeostasis model assessment (HOMA): 22.5/[fasting insulin×fasting glucose] (Matthews, D. R. et al. Diabetologia 28, 412-9 (1985)). The association between CIR (HOMA) and genotype status was tested using a multiple regression where the log-transformed CIR (HOMA) where taken as the response variable and the explanatory variable was either the number of copies of risk allele an individual carries (an additive model) or an indicator variable for homozygous carriers of the risk allele (a recessive model). Adjustment for sex, age and affection status was done by including the appropriate terms as explanatory variables. For comparison insulin secretion was also calculated as (insulin at 30 minutes−insulin at 0 minutes)÷(glucose at 30 minutes−glucose at 0 minutes), yielding comparable results.
Cell lines. The INS1 cells were provided by Hoffmann-LaRoche. They were grown in RPMI1640 (Invitrogen) supplemented with 10% fetal bovine serum (Invitrogen), 50 μg/ml penicillin-streptomycin (Invitrogen), 50 μM 2-mercaptoethanol (SIGMA), 1 mM MEM sodium pyruvate (Invitrogen) and 10 mM Hepes buffer solution (Invitrogen). They were split 1:2 twice per week by washing once in 1× Hanks Balanced Salt Solution (Invitrogen) and then trypsinized (trypsin-EDTA; Invitrogen).
Preparation of RNA and cDNA amplification. INS1 cells were incubated for 48 h in normal growth medium containing 10 mM glucose. At the time of harvest there were 2×10⁷ cells, which were used for the preparation of total RNA. RNA was extracted using RNeasy Midi Kit (Quiagen). cDNA was prepared using High-Capacity cDNA Archive Kit (Applied Biosystems). CDKAL1 cDNA was amplified using two different primer pairs between exons 2 and 8 (forward: 5′-GGGGCTGCTCACATAATAATTCA-3′; reverse: 5′-TGTGCCAATGTCTCTGCCATA-3′) and between exons 7 and 13 (forward: 5′-ACCTGGCCAGCTATCCCATT-3′; reverse: 5′-CCATTTTTCCCATGAATGCAG-3′). Primers from beta-actin served as positive controls (forward 5′-ATCTGGCACCACACCTCCTACAATGAGCTGC-3′; reverse: 5′-CGTCATACTCCTGCTTGCTGATCCACATCTGC-3′).

### Results and Discussion

[0281] For each phenotype tested we selected all single SNPs and two marker haplotypes with P<0.00005 for replication in a case-control sample from Denmark (Denmark B). After eliminating redundant markers a total of 46 SNPs were taken further for the attempt at replication (Table 14). In addition, we included the five most significant non-synonymous SNPs present on the Illumina Hap300 chip. Out of those 51 SNPs, 47 were successfully genotyped in 1110 Danish T2D cases and 2272 controls. In the Danish group SNPs rs7756992 and rs13266634 stood out and were significantly replicated with P=0.00013 and OR=1.24 and P=0.0012 and OR=1.20, respectively, in the Danish group of all T2D patients (Table 15). This is compared to P=0.00021 and OR=1.23 and P=0.000061 and OR=1.19, respectively in the initial Icelandic study. All of the other SNPs genotyped had P>0.01 in the Danish group and were not pursued further. The first SNP, rs7756992, is located in intron 5 of the CDK5 regulatory subunit associated protein 1-like 1 (CDKAL1) gene on 6p22.3. It resides in a large LD block of 201.7 kb that includes exons 1-5 of the CDKAL1 gene as well as the minimal promoter region but no other known genes (FIG. 5). The second SNP, rs13266634, is a non-synonymous SNP causing an arginine 325 to tryptophan change in the last exon of the solute carrier family 30 (zinc transporter), member 8 (SLC30A8) gene on 8q24. The gene product of SLC30A8 is specific to the pancreas and it is expressed in beta cells where it facilitates the accumulation of zinc from the cytoplasm into intracellular vesicles (Chimienti, F., et al. Diabetes 53, 2330-7 (2004)). The risk allele of rs13266634 on 8q24 has recently been found to confer risk of T2D in a genome wide association study of French T2D cases and controls (Sladek, R. et al. Nature 445, 881-5 (2007)). Of other significantly associated SNPs in that study, we also replicated, in the initial Icelandic samples, association to two SNPs close to the HHEX gene (Table 16). However, we did not replicate the reported association to markers in the LOC387761 and EXT2 genes also described in that study.

[0282] We typed the SNPs rs7756992 and rs13266634 in four other T2D case-control groups of European ancestry from Denmark (Denmark A), Scotland, the Netherlands and Philadelphia, US as well as case-control groups from Hong Kong and West Africa. Furthermore, the size of the Denmark B study group was expanded mostly by increasing the number of genotyped controls. The association of the G allele of rs7756992 was replicated with significance in the Scottish (OR=1.11; P=0.0042) and the Hong Kong (OR=1.25; P=0.00018) case-control groups (Table 17). Association in other study groups was not individually significant, but all were in the same direction. The observed association from combining all eight case-control groups gave an OR of 1.15 with a corresponding P of 9.0×10⁻¹² (Table 17). Given that approximately 2 million tests were performed in the initial genome-scan, this association remained highly significant with Bonferonni adjustment (P_{adj}=1.8×10⁻⁵) (Skol, A. D., et al. Nat Genet 38, 209-13 (2006)). Attempts at refining the association observed with rs7756992 by genotyping additional markers that correlate with the original signal in the HapMap CEPH (CEU) dataset, did not yield more significant results (Table 18). As could be expected the linkage disequilibrium observed for the West African population was considerably less than that seen for the Icelandic and Hong Kong groups (Table 19). Further work is needed to determine if an associated variant with a higher OR than observed for rs7756992 can be identified in the West African group. Likewise, for allele C of the non-synonymous SNP rs13266634 the association to T2D was replicated with significance in three of the six additional groups (from Scotland, Philadelphia and Hong Kong) (Table 17). Even though the OR for Denmark B decreased with the larger sample size and the estimated effect was in the opposite direction (only slightly and non-significant) for Denmark A, the combined results from all study group yielded a genome-wide significant P of 2.5×10⁻¹¹ and an OR of 1.16 (Table 17).

[0283] In the Icelandic study the association to rs7756992 was more significant in non-obese T2D patients (OR=1.37; P=9.0×10⁻⁶) than in the group of all patients (OR=1.23; P=0.00021) (Table 14 and Table 17). A higher OR in non-obese than in obese T2D patients was also observed for this variant in the other populations studied. For the combined populations of European origin the OR was 1.19; P=7.29×10⁻⁹ for the non-obese T2D patients compared to OR=1.12; P=0.00017 for the obese group. An even stronger effect was seen in the Hong Kong non-obese T2D group (OR=1.36; P=7.48×10⁻⁶), compared to the obese group (OR=1.13; P=0.094), where obesity was defined as BMI≧25. When the results for all groups were combined, relative to controls, OR=1.19; P=1.93×10⁻¹¹ and OR=1.13; P=2.68×10⁻⁵ was obtained for the non-obese and obese T2D patient groups, respectively. These results indicate that this variant does not confer increased risk of T2D through increased BMI.

[0284] Genotype odds ratio was estimated for each of the two loci (Table 20). Based on the results for the combined Caucasian study populations rs7756992 deviates significantly from the multiplicative model with OR for the heterozygote=1.09 compared to OR=1.45 for the homozygote, supporting a nearly recessive mode of inheritance. The same trend, although non-significant, was seen for the Hong Kong samples with heterozygote OR=1.13 and OR=1.55 for the homozygote. Conversely, a multiplicative model for the genotype relative risk provided an adequate fit for rs13266634.

[0285] The function of the gene product of CDKAL1 is not known. However, as implied in the gene name the protein product is similar to another protein, CDK5 regulatory subunit associated protein 1 (CDK5RAP1). CDK5RAP1 is expressed in neuronal tissues where it inhibits cyclin dependent kinase 5 (CDK5) activity by binding to the CDK5 regulatory subunit p35 (Ching, Y. P., et al. J Bio/Chem 277, 15237-40 (2002)). In pancreatic beta cells, CDK5 has been shown to play a role in the loss of beta cell function under glucotoxic conditions (Wei, F. Y. et al. Nat Med 11, 1104-8 (2005)). Furthermore, inhibition of the CDK5/p35 complex prevents decrease of insulin gene expression that results from glucotoxicity (Ubeda, M., et al. J Biol Chem 281, 28858-64 (2006)). It is tempting to speculate that CDKAL1 might play a role in the inhibition of CDK5/p35 in pancreatic beta cells similar to that of CDK5RAP1 in neuronal tissue. Reduced expression of CDKAL1 or reduced inhibitory function thus could lead to an impaired response to glucotoxicity. In this study we showed that CDKAL1 is expressed in the rat pancreatic beta cell line INS-1 (FIG. 6). Further studies are needed to determine if the effect of CDKAL1 on increasing the risk of T2D is exerted through this pathway.

[0286] Based on the predicted function of CDKAL1 and known function of SLC30A8 we would expect both rs7756992 and rs13266634 to affect insulin secretion. To evaluate the effects of the two SNPs on insulin secretion we analyzed the effect of genotype status on corrected insulin response (CIR) in a set of individuals from the Inter99 study (part of Denmark B) that had undergone an oral glucose tolerance test (OGTT). For rs7756992, we demonstrated that the homozygote carriers of the risk allele had an estimated 24% less CIR than the heterozygote carriers or non-carriers (P<0.00001, FIG. 7). This observation is consistent with the variant's nearly recessive mode of inheritance with respect to disease risk. Furthermore, the effect observed on CIR is present in both males and females (FIG. 8) and in T2D patients as well as controls, and adjusting for BMI status did not affect the results (Table 21). The effect of rs13266634 on insulin response was smaller but significant and for this risk variant the reduction in CIR was consistent with an additive effect. No effect on insulin sensitivity was observed for either variant (Table 21).

[0287] The identification of CDKAL1 as a susceptibility gene for T2D adds a new piece to the puzzle of how genetic factors may predispose to T2D. Although the function of this gene remains to be elucidated we have shown that it is expressed in pancreatic beta cells and that a variant within the gene is correlated with insulin secretion. The similarity to CDK5RAP1 further indicates that CDKAL1 may facilitate insulin production under glucotoxic conditions through interaction with CDK5. In conclusion, we have identified a variant in the CDKAL1 gene that in a nearly recessive manner blunts the insulin response and predisposes to T2D.

TABLE 14
Association to T2D in the Icelandic discovery group.

| | | | | | | All T2D cases (1399) | | |
|---|---|---|---|---|---|---|---|---|
| Chr | Position | Markers | Allele | | Con. frq | Case. frq | OR | P^{b} |
| | | | | Surrogate^{a} (r²) | | | | |
| C01 | 29602516 | rs4949283 rs502545 | TC | rs10798895 G (1) | 0.149 | 0.117 | 0.76 | 0.00016 |
| C01 | 104461151 | rs7553985 | C | — | 0.394 | 0.430 | 1.16 | 0.0023 |
| C01 | 104467009 | rs2166890 | T | — | 0.393 | 0.430 | 1.16 | 0.0018 |
| C01 | 104468502 | rs7552405 | T | — | 0.317 | 0.355 | 1.19 | 0.00078 |
| C01 | 151915609 | rs3738028 | G | — | 0.360 | 0.407 | 1.22 | 0.000046 |
| C02 | 40632580 | rs13414307 rs1990609 | AG | — | 0.517 | 0.571 | 1.24 | 0.0000089 |
| C02 | 40623619 | rs13414307 | A | — | 0.543 | 0.593 | 1.22 | 0.000033 |
| C02 | 55036788 | rs930493 rs10173697 | GT | — | 0.281 | 0.335 | 1.29 | 0.0000017 |
| C02 | 55040844 | rs10173697 | T | — | 0.503 | 0.553 | 1.22 | 0.000040 |
| C03 | 89162181 | rs12486049 | T | — | 0.872 | 0.904 | 1.38 | 0.000035 |
| C03 | 146863467 | rs7630694 | G | — | 0.060 | 0.070 | 1.20 | 0.065 |
| C03 | 196904151 | rs9858622 | A | — | 0.668 | 0.701 | 1.17 | 0.0028 |
| C04 | 140508134 | rs13116075 rs6824182 | AA | rs10033117 C (1) | 0.741 | 0.763 | 1.13 | 0.036 |
| C04 | 140604420 | rs2292837 rs11725721 | TC | — | 0.254 | 0.232 | 0.89 | 0.038 |
| C04 | 140621178 | rs3762864 rs11725721 | GC | — | 0.254 | 0.233 | 0.89 | 0.042 |
| C05 | 76637396 | rs832785 rs2859576 | AA | — | 0.510 | 0.470 | 0.85 | 0.00082 |
| C05 | 76635083 | rs4704400 | T | — | 0.490 | 0.530 | 1.18 | 0.0008 |
| C05 | 87882885 | rs10505855 rs12514611 | GC | rs10452479 G | 0.188 | 0.224 | 1.25 | 0.00023 |
| | | | | (0.94) | | | | |
| C06 | 6967990 | rs490213 rs814174 | AG | rs12201780 A (1) | 0.044 | 0.072 | 1.71 | 0.000016 |
| C06 | 9509965 | rs214447 | T | — | 0.424 | 0.449 | 1.11 | 0.034 |
| C06 | 20779501 | rs4712527 rs7756992 | AG | — | 0.232 | 0.270 | 1.23 | 0.00021 |
| C06 | 20805960 | rs7756992 rs9295478 | AG | — | 0.743 | 0.701 | 0.81 | 0.000089 |
| C06 | 20787688 | rs7756992 | G | — | 0.232 | 0.270 | 1.23 | 0.00021 |
| C06 | 31552682 | rs2516424 | C | — | 0.325 | 0.372 | 1.23 | 0.000039 |
| C06 | 31592562 | rs2516424 rs4947324 | CC | — | 0.320 | 0.368 | 1.24 | 0.000027 |
| C06 | 41130207 | rs10456499 | A | — | 0.563 | 0.597 | 1.15 | 0.0040 |
| C06 | 132387934 | rs9483377 rs997607 | GC | — | 0.234 | 0.278 | 1.26 | 0.000040 |
| C06 | 132379686 | rs9483377 rs7745875 | GG | — | 0.233 | 0.276 | 1.25 | 0.000048 |
| C06 | 132361238 | rs9483377 | G | — | 0.307 | 0.356 | 1.25 | 0.000013 |
| C06 | 150399255 | rs11155700 | A | — | 0.749 | 0.794 | 1.29 | 0.0000095 |
| C06 | 150399954 | rs12213837 | C | — | 0.749 | 0.794 | 1.29 | 0.0000097 |
| C06 | 164421443 | rs206732 rs933251 | TC | rs10085202 A (1) | 0.531 | 0.479 | 0.81 | 0.000037 |
| C08 | 124084183 | rs952656 | G | — | 0.673 | 0.721 | 1.25 | 0.000019 |
| C08 | 124092339 | rs13252935 rs7824293 | TG | — | 0.143 | 0.108 | 0.72 | 0.000010 |
| C08 | 128249239 | rs283710 rs412835 | CC | — | 0.254 | 0.222 | 0.84 | 0.0024 |
| C08 | 128250055 | rs185852 | G | — | 0.755 | 0.791 | 1.22 | 0.00050 |
| C08 | 128265112 | rs283718 rs283720 | CA | — | 0.255 | 0.223 | 0.84 | 0.0026 |
| C09 | 88426790 | rs10993008 | A | — | 0.154 | 0.192 | 1.30 | 0.000027 |
| C09 | 93768899 | rs10818991 rs10990303 | CC | rs10985640 A | 0.537 | 0.490 | 0.83 | 0.00019 |
| | | | | (0.85) | | | | |
| C09 | 93802193 | rs10990568 rs4743148 | GG | — | 0.263 | 0.309 | 1.25 | 0.000032 |
| C09 | 93810412 | rs4743148 | G | — | 0.315 | 0.365 | 1.25 | 0.000010 |
| C09 | 124790974 | rs3814120 | T | — | 0.093 | 0.113 | 1.25 | 0.0046 |
| C10 | 52735263 | rs7915186 rs3829170 | TT | — | 0.328 | 0.377 | 1.24 | 0.000021 |
| C10 | 52746400 | rs3829170 rs7922112 | TG | rs12247188 T (0.9) | 0.336 | 0.386 | 1.24 | 0.000021 |
| C10 | 93976392 | rs2421943 | G | — | 0.555 | 0.614 | 1.28 | 9.1 × 10⁻⁷ |
| C10 | 94022896 | rs2421943 rs7917359 | GC | — | 0.521 | 0.585 | 1.30 | 1.3 × 10⁻⁸ |
| C10 | 94068337 | rs7908111 rs2497304 | GG | — | 0.499 | 0.443 | 0.80 | 0.0000034 |
| C10 | 94011761 | rs1999763 rs10882091 | GT | — | 0.517 | 0.455 | 0.78 | 2.9 × 10⁻⁷ |
| C10 | 94023632 | rs1999763 rs6583830 | GG | — | 0.517 | 0.455 | 0.78 | 2.9 × 10⁻⁷ |
| C10 | 94012407 | rs6583826 | G | — | 0.467 | 0.518 | 1.23 | 0.000020 |
| C10 | 94025680 | rs6583826 rs10882091 | GC | — | 0.393 | 0.449 | 1.26 | 0.0000021 |
| C10 | 94092724 | rs10882091 rs7923837 | CG | — | 0.410 | 0.466 | 1.26 | 0.0000022 |
| C10 | 94038954 | rs10882091 | C | — | 0.415 | 0.472 | 1.26 | 0.0000024 |
| C10 | 94047527 | rs7914814 | T | — | 0.416 | 0.472 | 1.26 | 0.0000025 |
| C10 | 94062695 | rs6583830 | A | — | 0.415 | 0.472 | 1.26 | 0.0000024 |
| C10 | 94122233 | rs2275729 rs1111875 | AG | — | 0.470 | 0.527 | 1.26 | 0.0000023 |
| C10 | 94157293 | rs2497304 | A | — | 0.530 | 0.473 | 0.80 | 0.0000 |
| C10 | 94160330 | rs947591 | A | — | 0.475 | 0.526 | 1.23 | 0.000023 |
| C10 | 114441018 | rs7895307 rs12255372 | GT | — | 0.257 | 0.308 | 1.29 | 0.0000049 |
| C10 | 114422936 | rs7903146 | T | — | 0.300 | 0.372 | 1.38 | 1.9 × 10⁻¹⁰ |
| C10 | 114434905 | rs7903146 rs11196192 | TT | — | 0.220 | 0.282 | 1.39 | 3.4 × 10⁻⁹ |
| C10 | 114438514 | rs7904519 | G | — | 0.480 | 0.522 | 1.18 | 0.00045 |
| C10 | 114455586 | rs7904519 rs10885409 | GC | — | 0.474 | 0.516 | 1.18 | 0.00055 |
| C10 | 114455586 | rs7904519 rs10885409 | AT | — | 0.510 | 0.471 | 0.86 | 0.0013 |
| C10 | 114472659 | rs10885409 | C | — | 0.484 | 0.523 | 1.17 | 0.0014 |
| C10 | 114473489 | rs12255372 | T | — | 0.294 | 0.351 | 1.29 | 4.9 × 10⁻⁷ |
| C10 | 118261345 | rs1681748 rs2170862 | TT | — | 0.238 | 0.265 | 1.15 | 0.013 |
| C10 | 118285583 | rs2170862 | T | — | 0.256 | 0.281 | 1.13 | 0.020 |
| C10 | 118555280 | rs10787760 | G | — | 0.278 | 0.300 | 1.12 | 0.037 |
| C11 | 23946882 | rs1879230 | T | — | 0.088 | 0.111 | 1.30 | 0.00097 |
| C11 | 106474406 | rs1455593 | T | — | 0.097 | 0.114 | 1.20 | 0.021 |
| C12 | 30390375 | rs1429622 rs1506382 | AG | rs794598 C (0.9) | 0.368 | 0.321 | 0.82 | 0.000083 |
| C12 | 33373479 | rs1905421 | T | — | 0.082 | 0.110 | 1.39 | 0.000044 |
| C13 | 25558690 | rs565707 rs6491198 | AA | — | 0.281 | 0.249 | 0.85 | 0.0039 |
| C13 | 25478564 | rs565707 | C | — | 0.700 | 0.734 | 1.19 | 0.0016 |
| C13 | 25535031 | rs7984685 | C | — | 0.540 | 0.582 | 1.19 | 0.00043 |
| C13 | 25537643 | rs7998347 | C | — | 0.540 | 0.582 | 1.19 | 0.00046 |
| C13 | 25715179 | rs1333350 rs7987436 | GT | — | 0.254 | 0.216 | 0.81 | 0.00030 |
| C14 | 80759910 | rs799099 rs4899801 | AG | — | 0.365 | 0.390 | 1.11 | 0.037 |
| C14 | 80763881 | rs2066041 | G | — | 0.367 | 0.394 | 1.12 | 0.021 |
| C14 | 80820260 | rs10483957 | A | — | 0.459 | 0.493 | 1.15 | 0.0042 |
| C15 | 98094991 | rs9920347 rs11635811 | AG | rs2045107 C (0.9) | 0.521 | 0.469 | 0.81 | 0.000044 |
| C16 | 12811478 | rs6498353 rs9941146 | CG | — | 0.105 | 0.080 | 0.74 | 0.00054 |
| C16 | 22764405 | rs724466 | T | — | 0.738 | 0.781 | 1.26 | 0.000038 |
| C16 | 24353768 | rs11074618 rs985729 | AC | rs11644596 G (1) | 0.299 | 0.342 | 1.21 | 0.00044 |
| C16 | 73296557 | rs1862773 rs825842 | CT | — | 0.059 | 0.038 | 0.63 | 0.000048 |
| C16 | 73311680 | rs2432543 rs4887826 | TG | — | 0.069 | 0.043 | 0.61 | 0.000010 |
| C17 | 69180675 | rs17763769 rs1860316 | GA | — | 0.511 | 0.564 | 1.24 | 0.000013 |
| C17 | 69203439 | rs1860316 | A | — | 0.653 | 0.707 | 1.28 | 0.0000020 |
| C17 | 69242752 | rs1860316 rs17763811 | GC | — | 0.335 | 0.282 | 0.78 | 0.0000028 |
| C17 | 69218316 | rs1981647 | C | — | 0.513 | 0.563 | 1.23 | 0.000026 |
| C17 | 69234630 | rs1843622 | T | — | 0.615 | 0.665 | 1.24 | 0.000021 |
| C17 | 69244944 | rs2191113 | A | — | 0.696 | 0.744 | 1.27 | 0.000013 |
| C17 | 69259003 | rs9890889 | A | — | 0.839 | 0.869 | 1.27 | 0.00053 |
| C18 | 41051796 | rs10502860 | G | — | 0.167 | 0.194 | 1.20 | 0.0035 |
| C18 | 63451377 | rs764133 rs7237209 | TT | — | 0.167 | 0.132 | 0.76 | 0.00010 |
| C18 | 63463071 | rs7237209 | C | — | 0.819 | 0.852 | 1.27 | 0.00028 |
| C19 | 3316583 | rs3810420 | A | — | 0.176 | 0.189 | 1.09 | 0.16 |
| C20 | 37651862 | rs4592915 rs2232580 | GC | rs6127771 C (1) | 0.495 | 0.550 | 1.25 | 0.0000048 |
| C21 | 13769165 | rs468601 | A | — | 0.888 | 0.908 | 1.25 | 0.0054 |
| C21 | 33296778 | rs2834061 | G | — | 0.249 | 0.291 | 1.24 | 0.000076 |
| C21 | 39373432 | rs369906 | T | — | 0.566 | 0.613 | 1.21 | 0.00010 |
| | | | | Gene | | | | |
| C03 | 69453958 | rs10510980 | A | ENST00000343145 | 0.808 | 0.840 | 1.25 | 0.00065 |
| | | | | (K211R) | | | | |
| C08 | 118141371 | rs13266634 | C | SLC30A8 (R325W) | 0.646 | 0.685 | 1.19 | 0.00060 |
| C10 | 124472418 | rs2495774 | G | LOC390009 | 0.547 | 0.594 | 1.21 | 0.00011 |
| | | | | (Q27H) | | | | |
| C11 | 3624302 | rs2271586 | T | ART5 (T284K) | 0.176 | 0.208 | 1.23 | 0.00059 |
| C19 | 8669900 | rs10410943 | G | MGC33407 (A51V) | 0.674 | 0.714 | 1.20 | 0.00043 |

| | NonObese T2D cases (700) | | | Obese T2D cases (531) | | |
|---|---|---|---|---|---|---|
| Chr | Case. frq | OR | P^{b} | Case. frq | OR | P^{b} |
| C01 | 0.104 | 0.66 | 0.000033 | 0.133 | 0.88 | 0.21 |
| C01 | 0.419 | 1.11 | 0.11 | 0.466 | 1.34 | 0.000027 |
| C01 | 0.419 | 1.11 | 0.091 | 0.466 | 1.35 | 0.000024 |
| C01 | 0.346 | 1.14 | 0.047 | 0.386 | 1.35 | 0.000030 |
| C01 | 0.417 | 1.27 | 0.00016 | 0.409 | 1.23 | 0.0038 |
| C02 | 0.568 | 1.23 | 0.0011 | 0.582 | 1.30 | 0.00026 |
| C02 | 0.589 | 1.21 | 0.0028 | 0.603 | 1.28 | 0.00056 |
| C02 | 0.325 | 1.23 | 0.0024 | 0.333 | 1.27 | 0.0016 |
| C02 | 0.545 | 1.18 | 0.0086 | 0.560 | 1.25 | 0.0014 |
| C03 | 0.907 | 1.43 | 0.00043 | 0.901 | 1.34 | 0.0095 |
| C03 | 0.056 | 0.93 | 0.60 | 0.097 | 1.70 | 0.000033 |
| C03 | 0.682 | 1.07 | 0.34 | 0.737 | 1.40 | 0.000016 |
| C04 | 0.734 | 0.96 | 0.60 | 0.804 | 1.43 | 0.000024 |
| C04 | 0.259 | 1.03 | 0.69 | 0.194 | 0.71 | 0.000047 |
| C04 | 0.262 | 1.04 | 0.60 | 0.194 | 0.70 | 0.000038 |
| C05 | 0.489 | 0.92 | 0.18 | 0.438 | 0.75 | 0.000043 |
| C05 | 0.511 | 1.09 | 0.18 | 0.562 | 1.33 | 0.000043 |
| C05 | 0.244 | 1.39 | 0.000015 | 0.200 | 1.08 | 0.38 |
| C06 | 0.080 | 1.89 | 0.000037 | 0.063 | 1.48 | 0.033 |
| C06 | 0.416 | 0.97 | 0.61 | 0.495 | 1.34 | 0.000035 |
| C06 | 0.292 | 1.37 | 0.0000090 | 0.250 | 1.11 | 0.21 |
| C06 | 0.682 | 0.74 | 0.000013 | 0.718 | 0.88 | 0.11 |
| C06 | 0.292 | 1.37 | 0.0000090 | 0.250 | 1.11 | 0.20 |
| C06 | 0.375 | 1.25 | 0.00080 | 0.376 | 1.25 | 0.0020 |
| C06 | 0.370 | 1.25 | 0.00074 | 0.373 | 1.26 | 0.0016 |
| C06 | 0.575 | 1.05 | 0.43 | 0.637 | 1.36 | 0.000018 |
| C06 | 0.272 | 1.22 | 0.0067 | 0.276 | 1.25 | 0.0065 |
| C06 | 0.271 | 1.22 | 0.0052 | 0.273 | 1.23 | 0.0087 |
| C06 | 0.348 | 1.20 | 0.0052 | 0.354 | 1.24 | 0.0040 |
| C06 | 0.786 | 1.23 | 0.0049 | 0.801 | 1.35 | 0.00039 |
| C06 | 0.786 | 1.23 | 0.0049 | 0.801 | 1.35 | 0.00040 |
| C06 | 0.469 | 0.78 | 0.00015 | 0.497 | 0.87 | 0.058 |
| C08 | 0.706 | 1.17 | 0.021 | 0.725 | 1.28 | 0.0012 |
| C08 | 0.116 | 0.78 | 0.0099 | 0.104 | 0.69 | 0.00067 |
| C08 | 0.245 | 0.95 | 0.51 | 0.190 | 0.69 | 0.000025 |
| C08 | 0.764 | 1.05 | 0.49 | 0.822 | 1.49 | 0.0000046 |
| C08 | 0.256 | 1.01 | 0.94 | 0.189 | 0.68 | 0.0000092 |
| C09 | 0.181 | 1.21 | 0.019 | 0.194 | 1.32 | 0.0020 |
| C09 | 0.469 | 0.76 | 0.000037 | 0.513 | 0.91 | 0.18 |
| C09 | 0.314 | 1.28 | 0.00038 | 0.306 | 1.23 | 0.0076 |
| C09 | 0.371 | 1.28 | 0.00013 | 0.358 | 1.21 | 0.0092 |
| C09 | 0.094 | 1.01 | 0.91 | 0.140 | 1.59 | 0.000014 |
| C10 | 0.374 | 1.22 | 0.0021 | 0.375 | 1.23 | 0.0049 |
| C10 | 0.381 | 1.22 | 0.0027 | 0.387 | 1.24 | 0.0027 |
| C10 | 0.600 | 1.20 | 0.0043 | 0.621 | 1.31 | 0.00017 |
| C10 | 0.565 | 1.19 | 0.0052 | 0.602 | 1.39 | 0.0000041 |
| C10 | 0.456 | 0.84 | 0.0072 | 0.427 | 0.75 | 0.000039 |
| C10 | 0.472 | 0.83 | 0.0038 | 0.442 | 0.74 | 0.000019 |
| C10 | 0.472 | 0.83 | 0.0038 | 0.442 | 0.74 | 0.000019 |
| C10 | 0.508 | 1.18 | 0.0080 | 0.527 | 1.28 | 0.00048 |
| C10 | 0.435 | 1.19 | 0.0062 | 0.469 | 1.36 | 0.000012 |
| C10 | 0.452 | 1.19 | 0.0063 | 0.486 | 1.36 | 0.000011 |
| C10 | 0.456 | 1.18 | 0.0079 | 0.491 | 1.36 | 0.000014 |
| C10 | 0.456 | 1.18 | 0.0081 | 0.491 | 1.35 | 0.000014 |
| C10 | 0.456 | 1.18 | 0.0079 | 0.491 | 1.36 | 0.000014 |
| C10 | 0.519 | 1.22 | 0.0018 | 0.534 | 1.29 | 0.00025 |
| C10 | 0.481 | 0.82 | 0.00 | 0.466 | 0.77 | 0.000251 |
| C10 | 0.521 | 1.21 | 0.0028 | 0.545 | 1.33 | 0.000053 |
| C10 | 0.330 | 1.42 | 4.5 × 10⁻⁷ | 0.269 | 1.06 | 0.45 |
| C10 | 0.396 | 1.53 | 2.4 × 10⁻¹¹ | 0.342 | 1.21 | 0.010 |
| C10 | 0.298 | 1.51 | 9.4 × 10⁻⁹ | 0.263 | 1.27 | 0.0042 |
| C10 | 0.553 | 1.34 | 0.0000026 | 0.483 | 1.01 | 0.84 |
| C10 | 0.549 | 1.35 | 0.0000018 | 0.476 | 1.01 | 0.90 |
| C10 | 0.441 | 0.76 | 0.000011 | 0.510 | 1.00 | 0.99 |
| C10 | 0.555 | 1.33 | 0.0000060 | 0.483 | 0.99 | 0.94 |
| C10 | 0.371 | 1.41 | 1.6 × 10⁻⁷ | 0.317 | 1.11 | 0.15 |
| C10 | 0.245 | 1.04 | 0.59 | 0.302 | 1.38 | 0.000041 |
| C10 | 0.259 | 1.02 | 0.82 | 0.320 | 1.37 | 0.000043 |
| C10 | 0.269 | 0.96 | 0.53 | 0.347 | 1.38 | 0.000017 |
| C11 | 0.128 | 1.53 | 0.000021 | 0.093 | 1.07 | 0.57 |
| C11 | 0.087 | 0.89 | 0.29 | 0.142 | 1.54 | 0.000040 |
| C12 | 0.341 | 0.89 | 0.092 | 0.296 | 0.72 | 0.000023 |
| C12 | 0.116 | 1.47 | 0.00020 | 0.107 | 1.35 | 0.011 |
| C13 | 0.220 | 0.72 | 0.000016 | 0.274 | 0.97 | 0.69 |
| C13 | 0.763 | 1.38 | 0.0000073 | 0.710 | 1.05 | 0.53 |
| C13 | 0.606 | 1.31 | 0.000022 | 0.568 | 1.12 | 0.11 |
| C13 | 0.606 | 1.31 | 0.000024 | 0.568 | 1.12 | 0.11 |
| C13 | 0.195 | 0.71 | 0.000010 | 0.251 | 0.98 | 0.82 |
| C14 | 0.359 | 0.97 | 0.64 | 0.439 | 1.36 | 0.000022 |
| C14 | 0.368 | 1.01 | 0.92 | 0.437 | 1.34 | 0.000038 |
| C14 | 0.476 | 1.07 | 0.28 | 0.530 | 1.33 | 0.000042 |
| C15 | 0.475 | 0.84 | 0.0056 | 0.468 | 0.81 | 0.0041 |
| C16 | 0.068 | 0.62 | 0.000047 | 0.082 | 0.75 | 0.026 |
| C16 | 0.781 | 1.27 | 0.0012 | 0.783 | 1.29 | 0.0025 |
| C16 | 0.332 | 1.16 | 0.040 | 0.372 | 1.39 | 0.000032 |
| C16 | 0.041 | 0.67 | 0.0075 | 0.039 | 0.64 | 0.0072 |
| C16 | 0.042 | 0.60 | 0.00046 | 0.049 | 0.69 | 0.019 |
| C17 | 0.585 | 1.35 | 0.0000023 | 0.543 | 1.14 | 0.069 |
| C17 | 0.734 | 1.46 | 3.2 × 10⁻⁸ | 0.687 | 1.17 | 0.039 |
| C17 | 0.254 | 0.68 | 2.6 × 10⁻⁸ | 0.301 | 0.86 | 0.039 |
| C17 | 0.583 | 1.33 | 0.0000065 | 0.544 | 1.14 | 0.071 |
| C17 | 0.684 | 1.35 | 0.0000043 | 0.640 | 1.11 | 0.14 |
| C17 | 0.771 | 1.47 | 9.5 × 10⁻⁸ | 0.713 | 1.08 | 0.30 |
| C17 | 0.885 | 1.47 | 0.000032 | 0.857 | 1.14 | 0.17 |
| C18 | 0.218 | 1.39 | 0.000028 | 0.174 | 1.05 | 0.61 |
| C18 | 0.121 | 0.69 | 0.000048 | 0.135 | 0.78 | 0.014 |
| C18 | 0.867 | 1.44 | 0.000029 | 0.847 | 1.22 | 0.037 |
| C19 | 0.227 | 1.37 | 0.000045 | 0.146 | 0.80 | 0.021 |
| C20 | 0.558 | 1.29 | 0.000051 | 0.543 | 1.21 | 0.0060 |
| C21 | 0.927 | 1.60 | 0.000026 | 0.895 | 1.08 | 0.48 |
| C21 | 0.311 | 1.36 | 0.0000094 | 0.271 | 1.12 | 0.15 |
| C21 | 0.631 | 1.31 | 0.000028 | 0.587 | 1.09 | 0.24 |
| C03 | 0.836 | 1.22 | 0.019 | 0.845 | 1.30 | 0.0061 |
| C08 | 0.678 | 1.16 | 0.030 | 0.697 | 1.26 | 0.0020 |
| C10 | 0.592 | 1.20 | 0.0039 | 0.597 | 1.22 | 0.0043 |
| C11 | 0.212 | 1.26 | 0.0033 | 0.203 | 1.20 | 0.042 |
| C19 | 0.713 | 1.20 | 0.0076 | 0.708 | 1.17 | 0.035 |

The upper table includes association results for all SNPs or two-marker haplotypes that have an adjusted P value less than 10⁻⁵ for either all T2D cases, non-obese T2D cases or obese T2D cases. Included in the table is the chromosome, the position of the markers (or the midpoint for two-marker haplotypes) in NCBI Build 34, the markers and alleles tested, the corresponding surrogate SNP for two-markers haplotypes selected for replication, the frequency in controls and the frequency in cases, the odds ratio (OR) and adjusted P-value for the three case groups tested. The number of T2D cases in each of the three groups is included in parenthesis and the same set of 5275 controls is used in all tests. Note that information on BMI is missing for 168 of the cases. The lower table includes the corresponding values for the five most significant non-synonymous SNPs selected for replication. Included in column five are the corresponding genes and the codon changes. In both tables markers selected for further testing in the first replication group (Denmark B) are indicated with bold typesetting. Other markers/haplotypes were excluded from the replication study as they were a) highly correlated with another marker selected for replication, or b) belong to the TCF7L2 locus that has been studied previously.
^{a}A surrogate of the corresponding two marker haplotype with a correlation coefficient r².
^{b}P values adjusted for relatedness and population stratification using genomic control (see Methods).

TABLE 15
Association to T2D in the primary replication group (Denmark B).

| | | | | | | | | NonObese | | | | | |
|---|---|---|---|---|---|---|---|---|---|---|---|---|---|
| | | | | Con. | All T2D cases (1110) | | | T2D cases (640) | | | Obese T2D cases (470) | | |
| Chr | Position | Marker | Allele | frq | Case. frq | OR | P | Case. frq | OR | P | Case. frq | OR | P |
| C01 | 29589307 | rs10798895 | A | 0.832 | 0.828 | 0.97 | 0.68 | 0.831 | 0.99 | 0.94 | 0.824 | 0.94 | 0.55 |
| C01 | 104461151 | rs7553985 | C | 0.367 | 0.379 | 1.05 | 0.34 | 0.375 | 1.03 | 0.62 | 0.385 | 1.08 | 0.30 |
| C01 | 151915609 | rs3738028 | G | 0.385 | 0.410 | 1.11 | 0.050 | 0.419 | 1.15 | 0.029 | 0.397 | 1.05 | 0.47 |
| C02 | 40623619 | rs13414307 | A | 0.537 | 0.540 | 1.01 | 0.84 | 0.544 | 1.03 | 0.67 | 0.534 | 0.99 | 0.86 |
| C03 | 69453958 | rs10510980 | A | 0.826 | 0.833 | 1.05 | 0.50 | 0.835 | 1.06 | 0.50 | 0.831 | 1.03 | 0.74 |
| C03 | 89162181 | rs12486049 | T | 0.878 | 0.872 | 0.94 | 0.47 | 0.871 | 0.93 | 0.49 | 0.873 | 0.96 | 0.70 |
| C03 | 146863467 | rs7630694 | G | 0.053 | 0.054 | 1.02 | 0.85 | 0.051 | 0.95 | 0.72 | 0.059 | 1.12 | 0.46 |
| C03 | 196904151 | rs9858622 | A | 0.656 | 0.667 | 1.05 | 0.39 | 0.662 | 1.02 | 0.73 | 0.674 | 1.08 | 0.29 |
| C04 | 140660180 | rs10033117 | C | 0.740 | 0.746 | 1.03 | 0.65 | 0.747 | 1.04 | 0.65 | 0.744 | 1.02 | 0.81 |
| C05 | 76635083 | rs4704400 | T | 0.472 | 0.456 | 0.94 | 0.23 | 0.452 | 0.92 | 0.22 | 0.461 | 0.96 | 0.55 |
| C05 | 87825021 | rs10452479 | G | 0.229 | 0.238 | 1.05 | 0.43 | 0.240 | 1.06 | 0.43 | 0.235 | 1.04 | 0.68 |
| C06 | 6971276 | rs12201780 | A | 0.043 | 0.048 | 1.12 | 0.36 | 0.049 | 1.16 | 0.32 | 0.045 | 1.07 | 0.71 |
| C06 | 9509965 | rs214447 | T | 0.418 | 0.427 | 1.03 | 0.52 | 0.432 | 1.06 | 0.39 | 0.419 | 1.00 | 0.95 |
| C06 | 20787688 | rs7756992 | G | 0.276 | 0.322 | 1.24 | 0.00013 | 0.321 | 1.24 | 0.0021 | 0.323 | 1.25 | 0.0044 |
| C06 | 31552682 | rs2516424 | C | 0.363 | 0.380 | 1.07 | 0.19 | 0.374 | 1.05 | 0.48 | 0.387 | 1.11 | 0.18 |
| C06 | 41130207 | rs10456499 | A | 0.581 | 0.579 | 0.99 | 0.92 | 0.576 | 0.98 | 0.78 | 0.583 | 1.01 | 0.87 |
| C06 | 132361238 | rs9483377 | G | 0.306 | 0.331 | 1.12 | 0.039 | 0.334 | 1.14 | 0.061 | 0.327 | 1.10 | 0.20 |
| C06 | 150399255 | rs11155700 | A | 0.758 | 0.734 | 0.88 | 0.043 | 0.737 | 0.90 | 0.14 | 0.731 | 0.87 | 0.089 |
| C06 | 164425224 | rs10085202 | G | 0.430 | 0.426 | 0.99 | 0.78 | 0.424 | 0.98 | 0.73 | 0.428 | 0.99 | 0.94 |
| C08 | 118141371 | rs13266634 | C | 0.664 | 0.704 | 1.20 | 0.0012 | 0.701 | 1.19 | 0.013 | 0.707 | 1.22 | 0.012 |
| C08 | 124084183 | rs952656 | G | 0.672 | 0.672 | 1.00 | 0.98 | 0.680 | 1.04 | 0.56 | 0.660 | 0.95 | 0.51 |
| C08 | 128250055 | rs185852 | G | 0.796 | 0.797 | 1.01 | 0.92 | 0.794 | 0.99 | 0.88 | 0.801 | 1.03 | 0.72 |
| C09 | 88426790 | rs10993008 | A | 0.146 | 0.150 | 1.03 | 0.66 | 0.151 | 1.04 | 0.64 | 0.149 | 1.02 | 0.84 |
| C09 | 93745181 | rs10985640 | G | 0.430 | 0.434 | 1.01 | 0.78 | 0.421 | 0.96 | 0.57 | 0.451 | 1.09 | 0.25 |
| C09 | 93810412 | rs4743148 | G | 0.382 | 0.381 | 1.00 | 0.94 | 0.370 | 0.95 | 0.41 | 0.398 | 1.07 | 0.39 |
| C09 | 124790974 | rs3814120 | T | 0.089 | 0.090 | 1.02 | 0.84 | 0.076 | 0.85 | 0.16 | 0.109 | 1.27 | 0.052 |
| C10 | 52758344 | rs12247188 | T | 0.331 | 0.315 | 0.93 | 0.19 | 0.312 | 0.92 | 0.22 | 0.318 | 0.94 | 0.45 |
| C10 | 94047527 | rs7914814 | T | 0.413 | 0.432 | 1.08 | 0.14 | 0.434 | 1.09 | 0.18 | 0.429 | 1.07 | 0.35 |
| C10 | 118555280 | rs10787760 | G | 0.294 | 0.276 | 0.91 | 0.15 | 0.268 | 0.88 | 0.080 | 0.288 | 0.97 | 0.73 |
| C10 | 124472418 | rs2495774 | G | 0.524 | 0.540 | 1.07 | 0.22 | 0.542 | 1.07 | 0.27 | 0.538 | 1.06 | 0.46 |
| C11 | 23946882 | rs1879230 | T | 0.127 | 0.115 | 0.89 | 0.13 | 0.118 | 0.91 | 0.36 | 0.110 | 0.85 | 0.14 |
| C11 | 3624302 | rs2271586 | T | 0.190 | 0.201 | 1.07 | 0.28 | 0.194 | 1.02 | 0.77 | 0.211 | 1.14 | 0.13 |
| C11 | 106474406 | rs1455593 | T | 0.081 | 0.080 | 0.98 | 0.81 | 0.081 | 0.99 | 0.92 | 0.078 | 0.96 | 0.77 |
| C12 | 30434349 | rs794598 | T | 0.623 | 0.600 | 0.91 | 0.063 | 0.594 | 0.88 | 0.058 | 0.608 | 0.94 | 0.37 |
| C12 | 33373479 | rs1905421 | T | 0.099 | 0.097 | 0.98 | 0.79 | 0.086 | 0.85 | 0.17 | 0.113 | 1.16 | 0.24 |
| C14 | 80763881 | rs2066041 | G | 0.427 | 0.415 | 0.95 | 0.35 | 0.427 | 1.00 | 1.00 | 0.398 | 0.89 | 0.11 |
| C15 | 98060278 | rs2045107 | G | 0.524 | 0.527 | 1.01 | 0.78 | 0.522 | 0.99 | 0.92 | 0.534 | 1.04 | 0.55 |
| C16 | 12756032 | rs6498353 | C | 0.136 | 0.134 | 0.98 | 0.80 | 0.140 | 1.04 | 0.68 | 0.124 | 0.90 | 0.35 |
| C16 | 22764405 | rs724466 | T | 0.695 | 0.715 | 1.10 | 0.085 | 0.719 | 1.12 | 0.10 | 0.710 | 1.08 | 0.34 |
| C16 | 24356412 | rs11644596 | G | 0.324 | 0.323 | 1.00 | 0.94 | 0.336 | 1.06 | 0.43 | 0.305 | 0.92 | 0.27 |
| C16 | 73314817 | rs4887826 | G | 0.064 | 0.052 | 0.82 | 0.068 | 0.054 | 0.84 | 0.21 | 0.050 | 0.78 | 0.11 |
| C17 | 69203439 | rs1860316 | A | 0.679 | 0.682 | 1.01 | 0.82 | 0.684 | 1.02 | 0.74 | 0.679 | 1.00 | 1.00 |
| C18 | 41051796 | rs10502860 | G | 0.222 | 0.197 | 0.86 | 0.044 | 0.198 | 0.87 | 0.12 | 0.196 | 0.86 | 0.13 |
| C18 | 63463071 | rs7237209 | C | 0.861 | 0.852 | 0.92 | 0.29 | 0.848 | 0.89 | 0.22 | 0.857 | 0.97 | 0.74 |
| C19 | 3316583 | rs3810420 | A | 0.181 | 0.191 | 1.07 | 0.30 | 0.188 | 1.05 | 0.54 | 0.195 | 1.10 | 0.30 |
| C20 | 37645161 | rs6127771 | C | 0.447 | 0.451 | 1.02 | 0.77 | 0.442 | 0.98 | 0.77 | 0.462 | 1.06 | 0.39 |
| C21 | 33296778 | rs2834061 | G | 0.250 | 0.255 | 1.03 | 0.66 | 0.267 | 1.09 | 0.23 | 0.239 | 0.94 | 0.48 |

Association results for the 47 SNPs tested in the primary replication cohort (Denmark B), consisting of 1110 T2D cases and 2272 controls. Included in the table is the chromosome, the position of the SNPs in NCBI Build 34, the marker and allele tested, frequency in controls and the frequency in cases, odds ratio (OR) and P value in all T2D cases, non-obese T2D cases and obese T2D cases, respectively. For all three groups of cases, the same group of controls is used and the number of cases is included in the parentheses. The two SNPs selected for replication in additional T2D case-control groups are highlighted with bold typesetting.

TABLE 16
Association results for SNPs with reported association to T2D in Sladek et al.

| | | | | Icelandic study group | | | | Sladek et al | | | | |
|---|---|---|---|---|---|---|---|---|---|---|---|---|
| Chr | Position | Marker | Allele | Controls | Cases | OR | P | Controls | Cases | OR^{a} | P^{b} | Nearest gene |
| C08 | 118141371 | rs13266634 | C | 0.646 | 0.685 | 1.19 | 0.00060 | 0.699 | 0.746 | 1.26 | 5.0 × 10⁻⁷ | SLC30A8 |
| C10 | 94127459 | rs1111875 | G | 0.550 | 0.588 | 1.17 | 0.0014 | 0.598 | 0.642 | 1.21 | 9.1 × 10⁻⁶ | HHEX |
| C10 | 94146494 | rs7923837 | G | 0.583 | 0.624 | 1.19 | 0.00058 | 0.623 | 0.665 | 1.20 | 2.2 × 10⁻⁵ | HHEX |
| C10 | 114422936 | rs7903146 | T | 0.300 | 0.372 | 1.38 | 1.9 × | 0.293 | 0.406 | 1.65 | <1.0 × 10⁻⁷ | TCF7L2 |
| | | | | | | | 10⁻¹⁰ | | | | | |
| C11 | 42211027 | rs7480010 | G | 0.273 | 0.271 | 0.95 | 0.33 | 0.301 | 0.336 | 1.18 | 2.9 × 10⁻⁴ | LOC387761 |
| C11 | 44207712 | rs1113132 | C | — | — | — | — | 0.733 | 0.763 | 1.17 | 8.1 × 10⁻⁴ | EXT2 |
| C11 | 44219923 | rs11037909 | T | — | — | — | — | 0.729 | 0.760 | 1.18 | 4.5 × 10⁻⁴ | EXT2 |
| C11 | 44222111 | rs3740878 | A | — | — | — | — | 0.728 | 0.760 | 1.18 | 2.8 × 10⁻⁴ | EXT2 |
| C11 | 44244399 | rs729287 | C | 0.748 | 0.759 | 1.06 | 0.33 | — | — | — | — | EXT2 |

Shown are association results for T2D in the Icelandic study group for the eight SNPs identified by Sladek et al (Nature 445, 881-5 (2007)) to associate with T2D. For the Icelandic group the table includes the frequency in cases and controls, odds ratio (OR) and adjusted P value for five of the eight SNP's. Corresponding values are shown for the replication cohort used in Sladek et al. Three of the markers, rs1113132, rs11037909 and rs3740878, are not on the Illumina 300K chip; however, a surrogate SNP rs729287 which has a correlation r² = 1 to rs11037909 and rs3740878 (based on HapMap CEU data) has been typed in the Icelandic study group and results for this marker are included in the table.
^{a}Allelic OR calculated from frequency information provided in Table 1 of Sladek et al.
^{b}P value (based on permutation) for Stage 2 in Table 1 in Sladek et al.

TABLE 17
Association results for the SNPs rs7756992 and rs13266634
in six Caucasian T2D case-control groups and in case-control
groups from Hong Kong and from West-Africa.

| Study population (n/m) | Frequency | | | |
|---|---|---|---|---|
| Variant (allele) | Controls | Cases | OR (95% CI) | P value |
| Iceland (1399/5275) | | | | |
| rs7756992 (G) | 0.232 | 0.270 | 1.23 (1.10-1.37) | 0.00021 |
| rs13266634 (C) | 0.646 | 0.685 | 1.19 (1.08-1.31) | 0.0006 |
| Denmark A (263/597) | | | | |
| rs7756992 (G) | 0.297 | 0.331 | 1.17 (0.93-1.47) | 0.18 |
| rs13266634 (C) | 0.686 | 0.672 | 0.94 (0.75-1.17) | 0.58 |
| Denmark B (1359/4825) | | | | |
| rs7756992 (G) | 0.279 | 0.320 | 1.21 (1.10-1.33) | 0.000054 |
| rs13266634 (C) | 0.673 | 0.692 | 1.09 (0.99-1.19) | 0.073 |
| Philadelphia (447/950) | | | | |
| rs7756992 (G) | 0.262 | 0.295 | 1.18 (0.98-1.42) | 0.073 |
| rs13266634 (C) | 0.678 | 0.760 | 1.51 (1.25-1.81) | 1.5 × 10⁻⁵ |
| Scotland (3742/3718) | | | | |
| rs7756992 (G) | 0.267 | 0.288 | 1.11 (1.03-1.19) | 0.0042 |
| rs13266634 (C) | 0.682 | 0.710 | 1.14 (1.06-1.22) | 0.00025 |
| The Netherlands (368/915) | | | | |
| rs7756992 (G) | 0.270 | 0.280 | 1.05 (0.86-1.27) | 0.64 |
| rs13266634 (C) | 0.717 | 0.736 | 1.10 (0.91-1.33) | 0.33 |
| Caucasian combined^{a} (7578/16280) | | | | |
| rs7756992 (G) | 0.264 | 0.293 | 1.16 (1.09-1.22) | 3.9 × 10⁻¹⁰ |
| rs13266634 (C) | 0.675 | 0.700 | 1.15 (1.10-1.20) | 3.3 × 10⁻⁹ |
| Hong Kong(1457/986) | | | | |
| rs7756992 (G) | 0.462 | 0.517 | 1.25 (1.11-1.40) | 0.00018 |
| rs13266634 (C) | 0.523 | 0.566 | 1.19 (1.06-1.33) | 0.0035 |
| West Africa^{a} (865/1106) | | | | |
| rs7756992 (G) | 0.612 | 0.625 | 1.02 (0.92-1.14) | 0.72 |
| rs13266634 (C) | 0.962 | 0.971 | 1.26 (0.88-1.81) | 0.21 |
| All groups combined (9900/18372) | | | | |
| rs7756992 (G) | | | 1.15 (1.11-1.20) | 9..0 × 10⁻¹² |
| rs13266634 (C) | | | 1.16 (1.11-1.21) | 2.5 × 10⁻¹¹ |

Shown are the number of T2D cases and controls (n/m), the allelic frequency in the affected and control individuals, the allelic odds-ratio (OR) with 95 confidence intervals (CI 95%) and two-sided P values based on the multiplicative model.
^{a}When combining results for the Caucasian groups and for the five West-African groups, OR's and P values are combined using a Mantel-Haenzsel model, while the frequency in cases and controls is estimated as a weighted average over the different study groups.

TABLE 18
Association of eight SNP's in CDKAL1 to T2D in Iceland, Hong Kong and West-Africa.

| | | | Combined^{a} | | Iceland | | | |
|---|---|---|---|---|---|---|---|---|
| SNP | Allele | Position^{b} | OR (95% CI) | P | Con. frq | Case. frq | OR | P |
| rs7752906 | A | 20774034 | 1.19 (1.11-1.28) | 6.5 × 10⁻⁷ | 0.296 | 0.338 | 1.22 | 0.00076 |
| rs1569699 | C | 20787289 | 1.19 (1.12-1.27) | 1.4 × 10⁻⁷ | 0.257 | 0.297 | 1.22 | 0.00018 |
| rs7756992 | G | 20787688 | 1.17 (1.09-1.25) | 3.1 × 10⁻⁶ | 0.232 | 0.270 | 1.23 | 0.00023 |
| rs9350271 | A | 20791143 | 1.18 (1.11-1.26) | 9.6 × 10⁻⁷ | 0.257 | 0.298 | 1.23 | 0.00016 |
| rs9356744 | C | 20793465 | 1.18 (1.11-1.26) | 7.9 × 10⁻⁷ | 0.256 | 0.297 | 1.23 | 0.00014 |
| rs9368222 | A | 20794975 | 1.20 (1.12-1.28) | 4.8 × 10⁻⁷ | 0.231 | 0.269 | 1.22 | 0.00029 |
| rs10440833 | A | 20796100 | 1.18 (1.11-1.27) | 1.4 × 10⁻⁶ | 0.233 | 0.269 | 1.22 | 0.00046 |
| rs6931514 | G | 20811931 | 1.19 (1.11-1.27) | 7.8 × 10⁻⁷ | 0.231 | 0.267 | 1.22 | 0.00047 |

| | Hong Kong | | | | West-Africa^{c} | | | |
|---|---|---|---|---|---|---|---|---|
| SNP | Con. frq | Case. frq | OR | P | Con. frq | Case. frq | OR | P |
| rs7752906 | 0.362 | 0.422 | 1.29 | 3.2 × 10⁻⁵ | 0.654 | 0.674 | 1.06 | 0.43 |
| rs1569699 | 0.463 | 0.519 | 1.25 | 0.00019 | 0.627 | 0.656 | 1.10 | 0.17 |
| rs7756992 | 0.462 | 0.517 | 1.25 | 0.00018 | 0.612 | 0.625 | 1.02 | 0.72 |
| rs9350271 | 0.356 | 0.406 | 1.23 | 0.00055 | 0.695 | 0.712 | 1.07 | 0.38 |
| rs9356744 | 0.357 | 0.407 | 1.24 | 0.00045 | 0.696 | 0.713 | 1.06 | 0.39 |
| rs9368222 | 0.355 | 0.405 | 1.24 | 0.00041 | 0.184 | 0.203 | 1.10 | 0.27 |
| rs10440833 | 0.354 | 0.407 | 1.25 | 0.00024 | 0.213 | 0.226 | 1.06 | 0.48 |
| rs6931514 | 0.464 | 0.520 | 1.25 | 0.00015 | 0.231 | 0.249 | 1.07 | 0.41 |

Association to T2D for eight SNP's in the CDKAL1 gene for three of the eight study groups; from Iceland, Hong Kong and West-Africa. The seven additional SNP's are all highly correlated to rs7756992.
^{a}Results for the three groups were combined using a Mantel-Haenszel model.
^{b}Basepair position in NCBI Build 34.
^{c}Results for the five West-African groups were combined using Mantel-Haenszel model and the allele frequencies shown are a weighted average of the frequency for the five groups.

TABLE 19
Pair-wise correlation for SNP's typed in CDKAL1.

| | r² | | | | | | | |
|---|---|---|---|---|---|---|---|---|
| D′ | rs7752906 | rs1569699 | rs7756992 | rs9350271 | rs9356744 | rs9368222 | rs10440833 | rs6931514 |

Iceland

| | | | | | | | | |
|---|---|---|---|---|---|---|---|---|
| rs7752906 | — | 0.55 | 0.66 | 0.56 | 0.56 | 0.67 | 0.66 | 0.65 |
| rs1569699 | 0.83 | — | 0.87 | 0.99 | 0.98 | 0.85 | 0.83 | 0.83 |
| rs7756992 | 0.98 | 1.00 | — | 0.86 | 0.86 | 0.99 | 0.97 | 0.96 |
| rs9350271 | 0.84 | 1.00 | 1.00 | — | 1.00 | 0.86 | 0.85 | 0.84 |
| rs9356744 | 0.84 | 1.00 | 1.00 | 1.00 | — | 0.87 | 0.86 | 0.85 |
| rs9368222 | 0.99 | 1.00 | 1.00 | 1.00 | 1.00 | — | 0.98 | 0.97 |
| rs10440833 | 0.96 | 0.97 | 1.00 | 0.98 | 0.99 | 1.00 | — | 0.99 |
| rs6931514 | 0.96 | 0.97 | 0.99 | 0.98 | 0.99 | 0.99 | 1.00 | — |

Hong Kong

| | | | | | | | | |
|---|---|---|---|---|---|---|---|---|
| rs7752906 | — | 0.45 | 0.46 | 0.77 | 0.76 | 0.77 | 0.77 | 0.46 |
| rs1569699 | 0.84 | — | 0.99 | 0.63 | 0.63 | 0.62 | 0.62 | 0.98 |
| rs7756992 | 0.84 | 1.00 | — | 0.63 | 0.62 | 0.64 | 0.64 | 0.99 |
| rs9350271 | 0.89 | 1.00 | 0.99 | — | 1.00 | 0.99 | 0.99 | 0.62 |
| rs9356744 | 0.88 | 0.99 | 0.99 | 1.00 | — | 0.99 | 0.99 | 0.62 |
| rs9368222 | 0.89 | 0.99 | 1.00 | 1.00 | 1.00 | — | 1.00 | 0.63 |
| rs10440833 | 0.89 | 1.00 | 1.00 | 1.00 | 1.00 | 1.00 | — | 0.63 |
| rs6931514 | 0.84 | 0.99 | 1.00 | 0.99 | 0.99 | 1.00 | 1.00 | — |

West-Africa

| | | | | | | | | |
|---|---|---|---|---|---|---|---|---|
| rs7752906 | — | 0.16 | 0.32 | 0.13 | 0.14 | 0.12 | 0.07 | 0.08 |
| rs1569699 | 0.42 | — | 0.61 | 0.72 | 0.72 | 0.12 | 0.07 | 0.09 |
| rs7756992 | 0.62 | 0.84 | — | 0.67 | 0.67 | 0.14 | 0.08 | 0.10 |
| rs9350271 | 0.40 | 0.96 | 0.99 | — | 0.99 | 0.10 | 0.04 | 0.05 |
| rs9356744 | 0.41 | 0.96 | 1.00 | 1.00 | — | 0.10 | 0.04 | 0.06 |
| rs9368222 | 1.00 | 0.96 | 0.95 | 1.00 | 1.00 | — | 0.86 | 0.76 |
| rs10440833 | 0.68 | 0.68 | 0.68 | 0.59 | 0.60 | 1.00 | — | 0.87 |
| rs6931514 | 0.73 | 0.72 | 0.73 | 0.63 | 0.65 | 0.99 | 1.00 | — |

Pair-wise correlation, D′ (lower left corner) and r² (upper right corner), for the eight SNP's in CDKAL1 that were tested for association to T2D. The correlation is estimated for control individuals from the Icelandic, Hong Kong and West-African study groups, respectively.

TABLE 20
Genotype specific odds ratio for rs7756992 and rs13266634.

| Study population | Allelic | Genotype odds ratio^{a} | | | |
|---|---|---|---|---|---|
| Variant (allele) | OR (95% CI) | 00 | 0X (95% CI) | XX (95% CI) | P^{b} |
| Caucasian | | | | | |
| rs7756992 (G) | 1.16 (1.09-1.22) | 1 | 1.09 (1.03-1.16) | 1.45 (1.31-1.61) | 0.00052 |
| rs13266634 (C) | 1.15 (1.11-1.20) | 1 | 1.12 (1.03-1.23) | 1.30 (1.18-1.43) | 0.63 |
| Hong Kong | | | | | |
| rs7756992 (G) | 1.25 (1.11-1.40) | 1 | 1.13 (0.97-1.31) | 1.55 (1.23-1.95) | 0.071 |
| rs13266634 (C) | 1.19 (1.06-1.33) | 1 | 1.13 (0.96-1.34) | 1.40 (1.11-1.76) | 0.43 |

^{a}Genotype odds ratio for heterozygous (0X) and homozygous carrier (XX) compared with non-carriers (00).
^{b}Test of the multiplicative model (the null hypotheses) versus the full model, one degree of freedom.

TABLE 21
Association to insulin secretion and insulin sensitivity.

| | | Analysis | | | | | | |
|---|---|---|---|---|---|---|---|---|
| | | Combined group | | | Controls | | T2D | |
| Trait | Group (n/m) | Effect (se) | P | P^{a} | Effect (se) | P | Effect (se) | P |
| Insulin | rs7756992 (add) | | | | | | | |
| Response | All (3715/223) | −0.083 (0.018) | 4.0E−06 | 9.1E−06 | −0.080 (0.018) | 1.3E−05 | −0.142 (0.095) | 0.14 |
| (CIR) | Males (1742/139) | −0.056 (0.025) | 0.025 | 0.042 | −0.058 (0.025) | 0.021 | −0.028 (0.119) | 0.82 |
| | Females (1973/84) | −0.100 (0.025) | 6.8E−05 | 0.00012 | −0.088 (0.025) | 0.00049 | −0.342 (0.144) | 0.02 |
| | rs7756992 (rec) | | | | | | | |
| | All (3715/223) | −0.243 (0.041) | 3.3E−09 | 4.9E−09 | −0.230 (0.042) | 3.7E−08 | −0.417 (0.199) | 0.037 |
| | Males (1742/139) | −0.225 (0.055) | 4.9E−05 | 0.00014 | −0.222 (0.056) | 7.5E−05 | −0.250 (0.250) | 0.32 |
| | Females (1973/84) | −0.232 (0.059) | 7.5E−05 | 7.6E−05 | −0.204 (0.060) | 0.00063 | −0.696 (0.301) | 0.023 |
| | rs13266634 (add) | | | | | | | |
| | All (3698/228) | −0.061 (0.017) | 0.0005 | 0.00056 | −0.059 (0.018) | 0.00075 | −0.083 (0.094) | 0.38 |
| | Males (1736/143) | −0.079 (0.024) | 0.0011 | 0.00091 | −0.062 (0.024) | 0.011 | −0.262 (0.109) | 0.017 |
| | Females (1962/85) | −0.048 (0.024) | 0.047 | 0.052 | −0.058 (0.024) | 0.016 | 0.233 (0.166) | 0.16 |
| HOMA | rs7756992 (add) | | | | | | | |
| | All (4430/1164) | −0.013 (0.013) | 0.33 | 0.7 | 0.002 (0.013) | 0.85 | −0.065 (0.038) | 0.082 |
| | Males (2062/691) | −0.002 (0.019) | 0.94 | 0.51 | 0.022 (0.020) | 0.26 | −0.070 (0.049) | 0.15 |
| | Females (2368/473) | −0.026 (0.018) | 0.14 | 0.22 | −0.018 (0.018) | 0.31 | −0.061 (0.059) | 0.3 |
| | rs13266634 (add) | | | | | | | |
| | All (4411/1166) | −0.015 (0.013) | 0.24 | 0.19 | −0.013 (0.013) | 0.31 | −0.024 (0.039) | 0.55 |
| | Males (2058/697) | −0.003 (0.019) | 0.88 | 0.81 | −0.010 (0.019) | 0.61 | 0.019 (0.050) | 0.7 |
| | Females (2353/469) | −0.028 (0.017) | 0.11 | 0.087 | −0.016 (0.017) | 0.34 | −0.092 (0.063) | 0.14 |

Association of the risk variants rs7756992 (G) and rs13266634 (C) to insulin secretion, estimated by corrected insulin response (CIR), and insulin sensitivity estimated the reciprocal of HOMA (homeostasis model assessment). The table includes number of T2D cases (n) and controls (m) used, the estimated effect and standard error and the P value obtained by regressing the log-transformed trait values on age, sex and either the number of risk alleles an individual carries (additive model) or an indicator variable for homozygous carriers of the risk allele (recessive model). When controls and T2D cases are analysed together an indicator variable for the affection status is included in the analysis. Also shown, for the combined group, is the corresponding P value obtained by adjusting for BMI status of the individuals in the analysis.
^{a}P value after adjusting for BMI by including a log(BMI) term among the explanatory variables.

TABLE 22
Surrogate markers for marker rs7756992 on chromosome 6.
Surrogates for rs7756992 on chromosome 6

| | | | | Pos SEQ ID |
|---|---|---|---|---|
| SNP | D′ | R2 | Pos B36 | NO: 1 |
| rs9460517 | 0.82 | 0.30 | 20636813 | 1818 |
| rs7772956 | 0.72 | 0.29 | 20637521 | 2526 |
| rs6904566 | 0.73 | 0.32 | 20643949 | 8954 |
| rs6927356 | 0.73 | 0.32 | 20644073 | 9078 |
| rs6905138 | 0.73 | 0.32 | 20644335 | 9340 |
| rs13194858 | 0.73 | 0.32 | 20644499 | 9504 |
| rs6456356 | 1.00 | 0.22 | 20649498 | 14503 |
| rs9366354 | 0.84 | 0.40 | 20653447 | 18452 |
| rs9368201 | 0.84 | 0.41 | 20654091 | 19096 |
| rs9348433 | 0.84 | 0.40 | 20657780 | 22785 |
| rs13203450 | 0.73 | 0.32 | 20673935 | 38940 |
| rs1012626 | 0.82 | 0.39 | 20685540 | 50545 |
| rs9460523 | 0.55 | 0.23 | 20690122 | 55127 |
| rs9350262 | 0.55 | 0.23 | 20692402 | 57407 |
| rs4712507 | 0.56 | 0.24 | 20693119 | 58124 |
| rs9366357 | 0.56 | 0.23 | 20707607 | 72612 |
| rs1997777 | 1.00 | 0.22 | 20710359 | 75364 |
| rs11964057 | 0.56 | 0.23 | 20710776 | 75781 |
| rs12206413 | 1.00 | 0.22 | 20715663 | 80668 |
| rs4515379 | 0.66 | 0.20 | 20735420 | 100425 |
| rs9465841 | 0.66 | 0.20 | 20737687 | 102692 |
| rs13190734 | 0.62 | 0.31 | 20738376 | 103381 |
| rs2328528 | 0.67 | 0.21 | 20739524 | 104529 |
| rs2328529 | 0.67 | 0.21 | 20739932 | 104937 |
| rs7768642 | 0.67 | 0.21 | 20741886 | 106891 |
| rs9465846 | 0.67 | 0.21 | 20742320 | 107325 |
| rs9465847 | 0.67 | 0.21 | 20742407 | 107412 |
| rs7755830 | 1.00 | 0.32 | 20742865 | 107870 |
| rs6940200 | 0.67 | 0.21 | 20743241 | 108246 |
| rs9465850 | 0.67 | 0.22 | 20747388 | 112393 |
| rs4710938 | 1.00 | 0.34 | 20748883 | 113888 |
| rs9348440 | 0.79 | 0.23 | 20749315 | 114320 |
| rs4235999 | 1.00 | 0.33 | 20751201 | 116206 |
| rs4710939 | 1.00 | 0.35 | 20752923 | 117928 |
| rs11965062 | 1.00 | 0.33 | 20755941 | 120946 |
| rs9460540 | 1.00 | 0.33 | 20756741 | 121746 |
| rs6456364 | 0.79 | 0.23 | 20757233 | 122238 |
| rs9295474 | 0.95 | 0.68 | 20760696 | 125701 |
| rs2328545 | 0.79 | 0.23 | 20761529 | 126534 |
| rs9368216 | 0.79 | 0.23 | 20763089 | 128094 |
| rs16884072 | 0.66 | 0.33 | 20763482 | 128487 |
| rs9460541 | 0.66 | 0.33 | 20764559 | 129564 |
| rs9460542 | 0.66 | 0.33 | 20764746 | 129751 |
| rs4712522 | 0.95 | 0.68 | 20764779 | 129784 |
| rs16884074 | 0.66 | 0.32 | 20764924 | 129929 |
| rs4712523 | 0.95 | 0.68 | 20765543 | 130548 |
| rs4710940 | 0.95 | 0.52 | 20765991 | 130996 |
| rs13190727 | 0.66 | 0.33 | 20766197 | 131202 |
| rs6906327 | 0.95 | 0.52 | 20767438 | 132443 |
| rs6456367 | 0.95 | 0.68 | 20767566 | 132571 |
| rs6456368 | 0.95 | 0.67 | 20767785 | 132790 |
| rs7749083 | 0.66 | 0.33 | 20768202 | 133207 |
| rs6456369 | 0.95 | 0.52 | 20768344 | 133349 |
| rs13203361 | 0.66 | 0.33 | 20769000 | 134005 |
| rs10946398 | 0.95 | 0.68 | 20769013 | 134018 |
| rs7774594 | 0.95 | 0.67 | 20769122 | 134127 |
| rs7754840 | 0.95 | 0.68 | 20769229 | 134234 |
| rs9460544 | 0.95 | 0.68 | 20769508 | 134513 |
| rs9460545 | 0.95 | 0.68 | 20769529 | 134534 |
| rs979614 | 1.00 | 0.34 | 20770102 | 135107 |
| rs4712525 | 0.95 | 0.68 | 20770945 | 135950 |
| rs4712526 | 0.95 | 0.68 | 20771014 | 136019 |
| rs9460546 | 0.95 | 0.68 | 20771611 | 136616 |
| rs736425 | 0.66 | 0.33 | 20772291 | 137296 |
| rs742642 | 0.79 | 0.23 | 20773060 | 138065 |
| rs7748382 | 0.95 | 0.68 | 20773528 | 138533 |
| rs7772603 | 0.95 | 0.68 | 20773925 | 138930 |
| rs7752780 | 0.95 | 0.68 | 20774001 | 139006 |
| rs7752906 | 0.95 | 0.70 | 20774034 | 139039 |
| rs11970425 | 0.66 | 0.33 | 20774436 | 139441 |
| rs9358356 | 0.95 | 0.67 | 20775361 | 140366 |
| rs9356743 | 0.79 | 0.23 | 20775667 | 140672 |
| rs9368219 | 1.00 | 0.53 | 20782670 | 147675 |
| rs1012635 | 1.00 | 0.42 | 20783274 | 148279 |
| rs1569699 | 1.00 | 0.72 | 20787289 | 152294 |
| rs9350271 | 1.00 | 0.78 | 20791143 | 156148 |
| rs9356744 | 1.00 | 0.75 | 20793465 | 158470 |
| rs7766070 | 1.00 | 1.00 | 20794552 | 159557 |
| rs9368222 | 1.00 | 1.00 | 20794975 | 159980 |
| rs10440833 | 1.00 | 1.00 | 20796100 | 161105 |
| rs2206734 | 1.00 | 0.53 | 20802863 | 167868 |
| rs6931514 | 1.00 | 1.00 | 20811931 | 176936 |
| rs11753081 | 1.00 | 0.53 | 20813569 | 178574 |
| rs1040558 | 1.00 | 0.53 | 20821685 | 186690 |
| rs9295478 | 0.62 | 0.30 | 20824232 | 189237 |
| rs2328548 | 1.00 | 0.53 | 20824937 | 189942 |
| rs6935599 | 1.00 | 0.53 | 20825074 | 190079 |
| rs9465871 | 1.00 | 0.53 | 20825234 | 190239 |
| rs10946403 | 1.00 | 0.53 | 20825383 | 190388 |
| rs2328549 | 1.00 | 0.30 | 20826219 | 191224 |
| rs9358357 | 1.00 | 0.53 | 20827124 | 192129 |
| rs9368224 | 1.00 | 0.53 | 20827211 | 192216 |
| rs9358358 | 1.00 | 0.30 | 20827372 | 192377 |
| rs9460550 | 1.00 | 0.53 | 20827540 | 192545 |
| rs9356746 | 1.00 | 0.30 | 20828258 | 193263 |
| rs9368226 | 1.00 | 0.50 | 20831036 | 196041 |
| rs12111351 | 0.61 | 0.29 | 20832537 | 197542 |
| rs9356747 | 0.60 | 0.29 | 20832986 | 197991 |
| rs9356748 | 1.00 | 0.30 | 20833076 | 198081 |
| rs7767391 | 1.00 | 0.50 | 20833219 | 198224 |
| rs7747752 | 0.62 | 0.30 | 20833402 | 198407 |
| rs17234378 | 0.80 | 0.24 | 20952720 | |

The table shows markers with values for r² of greater than 0.2 in the HapMap Caucasian CEPH samples. The search was performed over a 2 Mb region flanking rs77566992 (1 Mb upstream and 1 Mb downstream).

TABLE 23
Surrogate markers for marker rs10882091 on chromosome 10.
Surrogates for rs10882091 on chromosome 10

| | | | | Pos SEQ ID |
|---|---|---|---|---|
| SNP | D′ | R2 | Pos B36 | NO: 2 |
| rs7086285 | 0.71 | 0.23 | 94166068 | |
| rs2798253 | 0.93 | 0.32 | 94192885 | 1 |
| rs6583813 | 1.00 | 0.33 | 94199919 | 7035 |
| rs11187007 | 1.00 | 0.35 | 94204560 | 11676 |
| rs2149632 | 1.00 | 0.35 | 94222227 | 29343 |
| rs11187025 | 0.95 | 0.48 | 94247956 | 55072 |
| rs11187033 | 1.00 | 0.35 | 94252339 | 59455 |
| rs10509645 | 1.00 | 0.35 | 94267846 | 74962 |
| rs7078413 | 0.49 | 0.23 | 94280464 | 87580 |
| rs4646955 | 0.75 | 0.37 | 94284271 | 91387 |
| rs17445328 | 0.68 | 0.32 | 94295169 | 102285 |
| rs11187064 | 0.68 | 0.31 | 94298233 | 105349 |
| rs2421943 | 1.00 | 0.45 | 94301795 | 108911 |
| rs11187065 | 0.95 | 0.48 | 94301904 | 109020 |
| rs11187078 | 1.00 | 0.35 | 94330685 | 137801 |
| rs6583823 | 1.00 | 0.52 | 94334395 | 141511 |
| rs2421941 | 0.96 | 0.93 | 94335889 | 143005 |
| rs6583826 | 0.95 | 0.57 | 94337810 | 144926 |
| rs3824735 | 1.00 | 0.36 | 94344184 | 151300 |
| rs10786050 | 1.00 | 1.00 | 94357210 | 164326 |
| rs11187094 | 1.00 | 0.21 | 94358158 | 165274 |
| rs11187096 | 1.00 | 0.35 | 94359568 | 166684 |
| rs7914814 | 1.00 | 1.00 | 94372930 | 180046 |
| rs12772554 | 1.00 | 0.23 | 94373838 | 180954 |
| rs10882094 | 1.00 | 1.00 | 94377656 | 184772 |
| rs10882095 | 1.00 | 0.37 | 94384382 | 191498 |
| rs10736069 | 1.00 | 1.00 | 94385373 | 192489 |
| rs7900689 | 1.00 | 1.00 | 94385728 | 192844 |
| rs6583830 | 1.00 | 1.00 | 94388098 | 195214 |
| rs10882096 | 1.00 | 0.35 | 94391366 | 198482 |
| rs11187114 | 1.00 | 0.36 | 94396217 | 203333 |
| rs6583833 | 1.00 | 0.76 | 94399780 | 206896 |
| rs7078243 | 1.00 | 0.78 | 94404243 | 211359 |
| rs4933734 | 1.00 | 1.00 | 94404547 | 211663 |
| rs7911264 | 1.00 | 0.73 | 94426831 | 233947 |
| rs2488087 | 1.00 | 0.74 | 94436021 | 243137 |
| rs10882100 | 1.00 | 0.74 | 94450667 | 257783 |
| rs1111875 | 1.00 | 0.51 | 94452862 | 259978 |
| rs12778642 | 1.00 | 0.55 | 94454287 | 261403 |
| rs5015480 | 1.00 | 0.51 | 94455539 | 262655 |
| rs10882102 | 1.00 | 0.52 | 94456475 | 263591 |
| rs11187144 | 1.00 | 0.40 | 94459960 | 267076 |
| rs7087591 | 1.00 | 0.39 | 94463609 | 270725 |
| rs10748582 | 1.00 | 0.39 | 94467199 | 274315 |
| rs7923837 | 1.00 | 0.39 | 94471897 | 279013 |
| rs7923866 | 1.00 | 0.39 | 94472056 | 279172 |
| rs2497306 | 1.00 | 0.58 | 94475191 | 282307 |
| rs2488075 | 1.00 | 0.60 | 94480154 | 287270 |
| rs2497304 | 0.96 | 0.63 | 94482696 | 289812 |
| rs947591 | 0.81 | 0.57 | 94485733 | 292849 |
| rs2488071 | 0.62 | 0.24 | 94489557 | 296673 |

The table shows markers with values for r² of greater than 0.2 in the HapMap Caucasian CEPH samples. The search was performed over a 2 Mb region flanking rs10882091 (1 Mb upstream and 1 Mb downstream).

TABLE 24
Surrogate markers for marker rs2191113 on chromosome 17.
Surrogates for rs2191113 on chromosome 17

| | | | | POS SEQ ID |
|---|---|---|---|---|
| SNP | D′ | R2 | Pos B36 | NO: 3 |
| rs350605 | 0.82 | 0.54 | 66044207 | 6552 |
| rs350603 | 0.80 | 0.22 | 66045245 | 7590 |
| rs420762 | 0.80 | 0.24 | 66049716 | 12061 |
| rs350615 | 0.86 | 0.58 | 66067303 | 29648 |
| rs350616 | 0.81 | 0.25 | 66067699 | 30044 |
| rs350621 | 0.86 | 0.58 | 66079419 | 41764 |
| rs350624 | 0.86 | 0.58 | 66080067 | 42412 |
| rs12602288 | 1.00 | 0.36 | 66085473 | 47818 |
| rs1431454 | 0.82 | 0.26 | 66090535 | 52880 |
| rs9302918 | 1.00 | 0.23 | 66091912 | 54257 |
| rs9302919 | 0.81 | 0.26 | 66092080 | 54425 |
| rs9911671 | 0.86 | 0.61 | 66094196 | 56541 |
| rs1911969 | 0.86 | 0.60 | 66102315 | 64660 |
| rs9894021 | 1.00 | 0.21 | 66103236 | 65581 |
| rs720877 | 1.00 | 0.23 | 66103561 | 65906 |
| rs720876 | 1.00 | 0.23 | 66103923 | 66268 |
| rs7218838 | 0.86 | 0.61 | 66106415 | 68760 |
| rs9896809 | 1.00 | 0.21 | 66106911 | 69256 |
| rs7220084 | 0.82 | 0.26 | 66114858 | 77203 |
| rs1860316 | 0.86 | 0.61 | 66117911 | 80256 |
| rs8079029 | 0.90 | 0.62 | 66118485 | 80830 |
| rs4019476 | 0.87 | 0.63 | 66122077 | 84422 |
| rs1981647 | 0.82 | 0.26 | 66132788 | 95133 |
| rs9890554 | 0.80 | 0.21 | 66134831 | 97176 |
| rs10221225 | 0.80 | 0.22 | 66138452 | 100797 |
| rs11650683 | 0.84 | 0.22 | 66139800 | 102145 |
| rs1486290 | 0.82 | 0.27 | 66141933 | 104278 |
| rs8078302 | 0.85 | 0.23 | 66143200 | 105545 |
| rs12949591 | 1.00 | 0.20 | 66146912 | 109257 |
| rs1843622 | 1.00 | 0.61 | 66149102 | 111447 |
| rs9891997 | 1.00 | 0.28 | 66152998 | 115343 |
| rs9910837 | 1.00 | 0.28 | 66155303 | 117648 |
| rs4793497 | 0.94 | 0.58 | 66163076 | 125421 |
| rs9890889 | 0.89 | 0.24 | 66173475 | |
| rs2009802 | 0.71 | 0.23 | 66178475 | |
| rs17718938 | 1.00 | 0.28 | 66184700 | |
| rs17223216 | 0.89 | 0.24 | 66207685 | |
| rs2109050 | 0.89 | 0.24 | 66228633 | |
| rs1962801 | 1.00 | 0.31 | 66236090 | |

The table shows markers with values for r² of greater than 0.2 in the HapMap Caucasian CEPH samples. The search was performed over a 2 Mb region flanking rs2191113 (1 Mb upstream and 1 Mb downstream).

1. A method of determining a susceptibility to Type 2 diabetes in a human individual, comprising determining the presence or absence of at least one allele of at least one polymorphic marker in a nucleic acid sample obtained from the individual, or in a genotype dataset from the individual, wherein the at least one polymorphic marker is selected from the group consisting of the markers set forth in Tables 10-12, and markers in linkage disequilibrium therewith, and wherein determination of the presence or absence of the at least one allele is indicative of a susceptibility to Type 2 diabetes.

2. The method of claim 1, wherein the at least one polymorphic marker is present within SEQ ID NO:1, SEQ ID NO:2 or SEQ ID NO:3.

3. The method of claim 1, wherein the at least one polymorphic marker comprises at least one marker selected from markers rs2497304 (SEQ ID NO:16), rs947591 (SEQ ID NO:30), rs10882091 (SEQ ID NO:4), rs7914814 (SEQ ID NO:24), rs6583830 (SEQ ID NO:20), rs2421943 (SEQ ID NO:15), rs6583826 (SEQ ID NO:19), rs7752906 (SEQ ID NO:32), rs1569699 (SEQ ID NO:6), rs7756992 (SEQ ID NO:21), rs9350271 (SEQ ID NO:33), rs9356744 (SEQ ID NO:34), rs9368222 (SEQ ID 35), rs10440833 (SEQ ID NO:36), rs6931514 (SEQ ID NO:37), rs1860316 (SEQ ID NO:10), rs1981647 (SEQ ID NO:11), rs1843622 (SEQ ID NO:9), rs2191113 (SEQ ID NO:13), rs9890889 (SEQ ID NO:31), and markers in linkage disequilibrium therewith.

4. The method of claim 1, wherein the at least one polymorphic marker comprises at least one marker in strong linkage disequilibrium, as defined by numeric values for |D′| of greater than 0.8 and/or r² of greater than 0.2, with one or more markers selected from the group consisting of the markers set forth in Table 22, Table 23 and Table 24.

5. The method of claim 1, wherein the at least one polymorphic marker is selected from markers rs7752906 (SEQ ID NO:32), rs1569699 (SEQ ID NO:6), rs7756992 (SEQ ID NO:21), rs9350271 (SEQ ID NO:33), rs9356744 (SEQ ID NO:34), rs9368222 (SEQ ID NO:35), rs10440833 (SEQ ID NO:36), rs6931514 (SEQ ID NO:37), and markers in linkage disequilibrium therewith.

6. The method of claim 5, wherein the at least one polymorphic marker is selected from markers rs7752906 (SEQ ID NO:32), rs1569699 (SEQ ID NO:6), rs7756992 (SEQ ID NO:21), rs9350271 (SEQ ID NO:33), rs9356744 (SEQ ID NO:34), rs9368222 (SEQ ID NO:35), rs10440833 (SEQ ID NO:36), and rs6931514 (SEQ ID NO:37).

7. The method of claim 1, wherein the at least one polymorphic marker is selected from marker rs7756992 (SEQ ID NO: 21), and markers in linkage disequilibrium therewith.

8. The method of claim 7, wherein the at least one polymorphic markers is selected from the markers set forth in Table 22.

9. The method of claim 1, wherein the at least one polymorphic marker is selected from marker rs10882091 (SEQ ID NO: 4), and markers in linkage disequilibrium therewith.

10. The method of claim 9, wherein the at least one polymorphic marker is selected from the markers set forth in Table 23.

11. The method of claim 1, wherein the at least one marker is selected from marker rs2191113 (SEQ ID NO: 13), and markers in linkage disequilibrium therewith.

12. The method of claim 11, wherein the at least one marker is selected from the markers set forth in Table 24.

13-16. (canceled)

17. The method of claim 3, wherein the presence of rs2497304 allele A, rs947591 allele A, rs10882091 allele C rs7914814 allele T, rs6583830 allele A, rs2421943 allele G, rs6583826 allele G, rs7752906 allele A, rs1569699 allele C, rs7756992 allele G, rs9350271 allele A, rs9356744 allele C, rs9368222 allele A, rs10440833 allele A, rs6931514 allele G, rs1860316 allele A, rs1981647 allele C, rs1843622 allele T, rs2191113 allele A, and/or rs9890889 allele A is indicative of increased susceptibility of Type 2 diabetes.

18-22. (canceled)

23. A method of assessing a susceptibility to Type 2 diabetes in a human individual, comprising screening a nucleic acid from the individual, or a genotype dataset for the individual, for at least one polymorphic marker or haplotype in SEQ ID NO:1, SEQ ID NO:2 or SEQ ID NO:3, that correlates with increased occurrence of Type 2 diabetes in a human population, wherein the presence of an at-risk marker allele in the at least one polymorphism or an at-risk haplotype in the nucleic acid identifies the individual as having elevated susceptibility to Type 2 diabetes, and wherein the absence of the at least one at-risk marker allele or at-risk haplotype in the nucleic acid identifies the individual as not having the elevated susceptibility.

24. The method of claim 23, wherein the polymorphism or haplotype is selected from markers rs2497304 (SEQ ID NO:16), rs947591 (SEQ ID NO:30), rs10882091 (SEQ ID NO:4), rs7914814 (SEQ ID NO:24), rs6583830 (SEQ ID NO:20), rs2421943 (SEQ ID NO:15), rs6583826 (SEQ ID NO:19), rs7752906 (SEQ ID NO:32), rs1569699 (SEQ ID NO:6), rs7756992 (SEQ ID NO:21), rs9350271 (SEQ ID NO:33), rs9356744 (SEQ ID NO:34), rs9368222 (SEQ ID NO:35), rs10440833 (SEQ ID NO:36), rs6931514 (SEQ ID NO:37), rs1860316 (SEQ ID NO:10), rs1981647 (SEQ ID NO:11), rs1843622 (SEQ ID NO:9), rs2191113 (SEQ ID NO:13), rs9890889 (SEQ ID NO:31), and markers in linkage disequilibrium therewith, as characterized by numeric values for |D′| of greater than 0.8 and/or r² of greater than 0.2.

25. The method of claim 24, further comprising screening the nucleic acid for the presence of at least one at-risk genetic variant for Type 2 diabetes not associated with LD Block C06 (SEQ ID NO:1), LD Block C10 (SEQ ID NO:2) and LD Block C17 (SEQ ID NO:3).

26. The method of claim 25, comprising screening the nucleic acid for the presence or absence of at least one at-risk allele of at least one at-risk variant for Type 2 diabetes in the TCF7L2 gene, wherein determination of the presence of the at least one at-risk allele is indicative of increased susceptibility of Type 2 diabetes.

27. The method of claim 25, wherein the at least one at-risk variant in the TCF7L2 gene is selected from marker DG10S478, rs12255372, rs7895340, rs11196205, rs7901695, rs7903146, rs12243326 and rs4506565, and markers in linkage disequilibrium therewith.

28. (canceled)

29. The method of claim 23, wherein the individual is of a specific human ancestry selected from the group consisting of: black African ancestry, European ancestry, Caucasian ancestry and Chinese ancestry.

30-34. (canceled)

35. The method of claim 27, wherein the ancestry is determined by genetic determination comprising detecting at least one allele of at least one polymorphic marker in a nucleic acid sample from the individual, wherein the presence or absence of the allele is indicative of the ancestry of the individual.

36-37. (canceled)

38. A method of identification of a marker for use in assessing susceptibility to Type 2 diabetes in human individuals, the method comprising
a) identifying at least one polymorphic marker within SEQ ID NO:1, SEQ ID NO:2 or SEQ ID NO:3, or at least one polymorphic marker in linkage disequilibrium therewith;
b) determining the genotype status of a sample of individuals diagnosed with, or having a susceptibility to, Type 2 diabetes; and
c) determining the genotype status of a sample of control individuals;
wherein a significant difference in frequency of at least one allele in at least one polymorphism in individuals diagnosed with, or having a susceptibility to, Type 2 diabetes, as compared with the frequency of the at least one allele in the control sample is indicative of the at least one polymorphism being useful for assessing susceptibility to Type 2 diabetes.

39. (canceled)

40. The method of claim 38, wherein the at least one polymorphic marker is in linkage disequilibrium, as characterized by numerical values of r² of greater than 0.2 and/or |D′| of greater than 0.8 with at least one marker selected from marker rs2497304 (SEQ ID NO:16), rs947591 (SEQ ID NO:30), rs10882091 (SEQ ID NO:4), rs7914814 (SEQ ID NO:24), rs6583830 (SEQ ID NO:20), rs2421943 (SEQ ID NO:15), rs6583826 (SEQ ID NO:19), rs7752906 (SEQ ID NO:32), rs1569699 (SEQ ID NO:6), rs7756992 (SEQ ID NO:21), rs9350271 (SEQ ID NO:33), rs9356744 (SEQ ID NO:34), rs9368222 (SEQ ID NO:35), rs10440833 (SEQ ID NO:36), rs6931514 (SEQ ID NO:37), rs1860316 (SEQ ID NO:10), rs1981647 (SEQ ID NO:11), rs1843622 (SEQ ID NO:9), rs2191113 (SEQ ID NO:13), or rs9890889 (SEQ ID NO:31).

41-52. (canceled)

53. The method of claim 38, wherein the individual is of a specific human ancestry selected from the group consisting of: black African ancestry, European ancestry, Caucasian ancestry and Chinese ancestry.

54-58. (canceled)

59. The method of claim 53, wherein the ancestry is determined by genetic determination comprising detecting at least one allele of at least one polymorphic marker in a nucleic acid sample from the individual, wherein the presence or absence of the allele is indicative of the ancestry of the individual.

60-61. (canceled)

62. A method of assessing an individual for probability of response to a therapeutic agent for preventing and/or ameliorating symptoms associated with Type 2 diabetes, comprising: determining the presence or absence of at least one allele of at least one polymorphic marker in a nucleic acid sample obtained from the individual, wherein the at least one polymorphic marker is selected from markers rs2497304 (SEQ ID NO:16), rs947591 (SEQ ID NO:30), rs10882091 (SEQ ID NO:4), rs7914814 (SEQ ID NO:24), rs6583830 (SEQ ID NO:20), rs2421943 (SEQ ID NO:15), rs6583826 (SEQ ID NO:19), rs7752906 (SEQ ID NO:32), rs1569699 (SEQ ID NO:6), rs7756992 (SEQ ID NO:21), rs9350271 (SEQ ID NO:33), rs9356744 (SEQ ID NO:34), rs9368222 (SEQ ID NO:35), rs10440833 (SEQ ID NO:36), rs6931514 (SEQ ID NO:37), rs1860316 (SEQ ID NO:10), rs1981647 (SEQ ID NO:11), rs1843622 (SEQ ID NO:9), rs2191113 (SEQ ID NO:13), rs9890889 (SEQ ID NO:31), and markers in linkage disequilibrium therewith, wherein determination of the presence of the at least one allele of the at least one marker is indicative of a probability of a positive response to the Type 2 diabetes therapeutic agent.

63. The method of claim 62, wherein the Type 2 diabetes therapeutic agent is selected from the group consisting of: the agents set forth in Agent Table 1 and Agent Table 2.

64. A method of predicting prognosis of an individual diagnosed with, Type 2 diabetes, the method comprising determining the presence or absence of at least one allele of at least one polymorphic marker in a nucleic acid sample obtained from the individual, wherein the at least one polymorphic marker is selected from the markers rs2497304 (SEQ ID NO:16), rs947591 (SEQ ID NO:30), rs10882091 (SEQ ID NO:4), rs7914814 (SEQ ID NO:24), rs6583830 (SEQ ID NO:20), rs2421943 (SEQ ID NO:15), rs6583826 (SEQ ID NO:19), rs7752906 (SEQ ID NO:32), rs1569699 (SEQ ID NO:6), rs7756992 (SEQ ID NO:21), rs9350271 (SEQ ID NO:33), rs9356744 (SEQ ID NO:34), rs9368222 (SEQ ID NO:35), rs10440833 (SEQ ID NO:36), rs6931514 (SEQ ID NO:37), rs1860316 (SEQ ID NO:10), rs1981647 (SEQ ID NO:11), rs1843622 (SEQ ID NO:9), rs2191113 (SEQ ID NO:13), rs9890889 (SEQ ID NO:31), and markers in linkage disequilibrium therewith, wherein determination of the presence of the at least one allele is indicative of a worse prognosis of the Type 2 diabetes in the individual.

65. A method of monitoring progress of a treatment of an individual undergoing treatment for Type 2 diabetes, the method comprising determining the presence or absence of at least one allele of at least one polymorphic marker in a nucleic acid sample obtained from the individual, wherein the at least one polymorphic marker is selected from the markers rs2497304 (SEQ ID NO:16), rs947591 (SEQ ID NO:30), rs10882091 (SEQ ID NO:4), rs7914814 (SEQ ID NO:24), rs6583830 (SEQ ID NO:20), rs2421943 (SEQ ID NO:15), rs6583826 (SEQ ID NO:19), rs7752906 (SEQ ID NO:32), rs1569699 (SEQ ID NO:6), rs7756992 (SEQ ID NO:21), rs9350271 (SEQ ID NO:33), rs9356744 (SEQ ID NO:34), rs9368222 (SEQ ID NO:35), rs10440833 (SEQ ID NO:36), rs6931514 (SEQ ID NO:37), rs1860316 (SEQ ID NO:10), rs1981647 (SEQ ID NO:11), rs1843622 (SEQ ID NO:9), rs2191113 (SEQ ID NO:13), rs9890889 (SEQ ID NO:31), and markers in linkage disequilibrium therewith, wherein determination of the presence of the at least one allele is indicative of the treatment outcome of the individual.

66-70. (canceled)

71. A kit for assessing susceptibility to Type 2 diabetes in a human individual, the kit comprising reagents for selectively detecting the presence or absence of at least one allele of at least one polymorphic marker in the genome of the individual, wherein the polymorphic marker is selected from the polymorphic markers within the nucleic acid segments whose sequences are set forth in SEQ ID NO:1, SEQ ID NO:2 and SEQ ID NO:3, and markers in linkage disequilibrium therewith, and wherein the presence of the at least one allele is indicative of a susceptibility to Type 2 diabetes.

72. (canceled)

73. The kit of claim 71, wherein the at least one polymorphic markers is selected from markers rs2497304 (SEQ ID NO:16), rs947591 (SEQ ID NO:30), rs10882091 (SEQ ID NO:4), rs7914814 (SEQ ID NO:24), rs6583830 (SEQ ID NO:20), rs2421943 (SEQ ID NO:15), rs6583826 (SEQ ID NO:19), rs7752906 (SEQ ID NO:32), rs1569699 (SEQ ID NO:6), rs7756992 (SEQ ID NO:21), rs9350271 (SEQ ID NO:33), rs9356744 (SEQ ID NO:34), rs9368222 (SEQ ID NO:35), rs10440833 (SEQ ID NO:36), rs6931514 (SEQ ID NO:37), rs1860316 (SEQ ID NO:10), rs1981647 (SEQ ID NO:11), rs1843622 (SEQ ID NO:9), rs2191113 (SEQ ID NO:13), rs9890889 (SEQ ID NO:31), and markers in linkage disequilibrium therewith.

74-82. (canceled)

83. A computer-readable medium on which is stored:
a) an identifier for at least one polymorphic marker;
b) an indicator of the frequency of at least one allele of said at least one polymorphic marker in a plurality of individuals diagnosed with Type 2 diabetes; and
c) an indicator of the frequency of the least one allele of said at least one polymorphic markers in a plurality of reference individuals;
wherein the at least one polymorphic marker is selected from the polymorphic markers rs2497304 (SEQ ID NO:16), rs947591 (SEQ ID NO:30), rs10882091 (SEQ ID NO:4), rs7914814 (SEQ ID NO:24), rs6583830 (SEQ ID NO:20), rs2421943 (SEQ ID NO:15), rs6583826 (SEQ ID NO:19), rs7752906 (SEQ ID NO:32), rs1569699 (SEQ ID NO:6), rs7756992 (SEQ ID NO:21), rs9350271 (SEQ ID NO:33), rs9356744 (SEQ ID NO:34), rs9368222 (SEQ ID NO:35), rs10440833 (SEQ ID NO:36), rs6931514 (SEQ ID NO:37), rs1860316 (SEQ ID NO:10), rs1981647 (SEQ ID NO:11), rs1843622 (SEQ ID NO:9), rs2191113 (SEQ ID NO:13), rs9890889 (SEQ ID NO:31), and polymorphisms in linkage disequilibrium therewith, as defined by numerical values of r² of at least 0.2 and/or values of |D′| at least 0.8.

84. The medium of claim 83, further comprising information about the ancestry of the plurality of individuals.

85. (canceled)

86. An apparatus for determining a genetic indicator for Type 2 diabetes in a human individual, comprising:
a computer readable memory; and
a routine stored on the computer readable memory;
wherein the routine is adapted to be executed on a processor to analyze marker and/or haplotype information for at least one human individual with respect to at least one polymorphic marker selected from the markers rs2497304 (SEQ ID NO:16), rs947591 (SEQ ID NO:30), rs10882091 (SEQ ID NO:4), rs7914814 (SEQ ID NO:24), rs6583830 (SEQ ID NO:20), rs2421943 (SEQ ID NO:15), rs6583826 (SEQ ID NO:19), rs7752906 (SEQ ID NO:32), rs1569699 (SEQ ID NO:6), rs7756992 (SEQ ID NO:21), rs9350271 (SEQ ID NO:33), rs9356744 (SEQ ID NO:34), rs9368222 (SEQ ID NO:35), rs10440833 (SEQ ID NO:36), rs6931514 (SEQ ID NO:37), rs1860316 (SEQ ID NO:10), rs1981647 (SEQ ID NO:11), rs1843622 (SEQ ID NO:9), rs2191113 (SEQ ID NO:13), rs9890889 (SEQ ID NO:31), and markers in linkage disequilibrium therewith, as defined by numerical values of r² of at least 0.2 and/or values of |D′| of at least 0.8, and generate an output based on the marker or haplotype information, wherein the output comprises a risk measure of the at least one marker or haplotype as a genetic indicator of Type 2 diabetes for the human individual.

87. The apparatus of claim 86, wherein the routine further comprises an indicator of the frequency of at least one allele of at least one polymorphic marker or at least one haplotype in a plurality of individuals diagnosed with Type 2 diabetes, and an indicator of the frequency of at the least one allele of at least one polymorphic marker or at least one haplotype in a plurality of reference individuals, and wherein a risk measure is based on a comparison of the at least one marker and/or haplotype status for the human individual to the indicator of the frequency of the at least one marker and/or haplotype information for the plurality of individuals diagnosed with Type 2 diabetes.

88-108. (canceled)

109. A method of assessing a susceptibility to Type 2 diabetes in a human individual, comprising screening the individual for at least one polymorphic marker in the CDKAL1 gene that correlates with increased occurrence of Type 2 diabetes in a human population, wherein determination of the presence of an at-risk allele in the at least one polymorphic marker identifies the individual as having an increased susceptibility to Type 2 diabetes, and wherein the absence of the at-risk allele identifies the individual as not having the elevated susceptibility.

110. The method of claim 109, wherein screening the individual comprises screening a nucleic acid from the individual.

111. The method of claim 109, wherein screening the individual comprises screening a genotype dataset derived from the individual.

112. The method of claim 109, wherein the at least one polymorphic marker is selected from the markers set forth in Table 9.

113. The method of claim 109, wherein the at least one polymorphic marker is marker rs7756992, or markers in linkage disequilibrium therewith.

The application's sequence listing, which the Patent Office published only in electronic form, follows.

SEQUENCE LISTING (44 sequences)

SEQ ID NO: 1 - DNA, 201715 bp, Homo sapiens
tgatatttcttgtgttttgtctatctctacctattagtatataaacttttttctttctttcttttttttttgtttttgagacagtctcgctctgttgcccaggctggagtgcagtggcacgatctccgctcactgcagcctctgcctcctgggttcaagcaattctctgcctcagcctcttgagtagctgggattacaggcatgcaccaccacgcctggctaatttttgtatttttggtagagacggggtttcaccatgttggccaggctggtcttgaattcctgacctcgtgatccacccgcctcagcctcccaaagtgttgggattacaggcgtgagccactgtgctcggccgcatataaattcttaaaaggggaatgatattgtctgttttattttttgagcatttagaacagtacttggtatactgtatatactcaataaatacattattatgtaactcaataagtttgcaatgtatgagtcatatattactgaaggacagagaaaacaacgcatgtcttctacccacagataattataagcaatcagggagttagacaacagatgcgaattcttatttttttaatcattaagagaatatgtaacagcaagaagtttagccagcactcttctggttgcaagtcatagaaatccactcaaattagtttaagaaaagaagagaaggatttacttgttaacataactgaatagcacaaaaagaaagctagctccaggcgtgctgggtataggggccttacaattgtccttggaacttattgatttctcccttcatctctcaactctgctttcctctgaaagagctttggtaggccgggcgtggtggctcacatctgtaatcccggcattttgggagtccgaggcgggtggatcatgaggtcaggagatcgagaccatcctggctaacacggtgaaaccccgtctctactaaaaatacaaaaaattagccaggcgtggtgatgcatacctgtagtcccagctactcgggaggctgaggcaggagaattgcttgaacctgtgagacggaggttgcagtgagccgagattgtgccactgcactccagcctgggcaacagagcgtgactctgtctcaaaaaaaaaaaaaaaaaatagcttcaatctcaggccggtgctctccttgtggtagtcctggaagcttctgcctcagaatttcacagttgaccgacaaccccgaattcacgctggcctggtgttggttgcattccctgtgatgttctcatttctctggcttgggctacagggcacttgtacaacccccaaaacacttgtactgagagtgggagagtgaacagataaaattaattatagaattgaaccaaacatatctgtgtaagttgatagagtagaatagatgatagtaaagctgaaagaggaggttcaagcctgtaatcccaatattttgggagactgaggcgggaggatcacttgagctaggagtttgagaccagcctgggtaacagcaagactttgtctctaccaaaaattaagaaaattagctaggattggcggtgtgcacacctatagtcccagctacttgacaggctgaggtgggcaggccgctggagcctgggaggtcgaggctgcagcaagccgtgacagcactactgcatgccagcctgggtgacagagccagaccctgtctcagaaaaaaaaaaaaaaaaaaaaaagttaatagaagtatagcactctgacccctagtggttaaattatgcagagaaaaattcaggacttgtccaaagacaacaggaggttgatttatttcacattatgttcctgtatgatctttttatcagtttatttaagagcatcagctttcttcccttttattctccacattgaagtatccatccatttggggcaatttttcctttcacatatatctagtatttctctcgccgcccgccccccccaattcctctgctgttaccatatttcttcttgggttcatccaacacctgaaaaatcttcctaaaaaactgttcagttggccaggcacagtggttcagggctgtaatcccagcactttgggaggccgaggcgggcggatcacctgaggtcagcagttggagaccagcctggccaacgtggcaaaaccctgtctctactaaaaatacaaaaatgggccaggcgcggtggctcaggcctgtaatcctagcactttgggaggccgaggcaagtggatcacctgaggtcaggaatttgagatcaccctggcccatgtggggaaaccgcgtctctacttaaaaaaaaaaaaaaaaaataggcgggtgtggtggtgggcgcctgtaatcccaggtactcaggaggctgaggcaggagaatcacttgaacctgggaggtggaggttgtagtgagccgagatcacaccactgcactccaacctgggtgacagagcaagactccatctcaaagaaaaaaaaaaaaaagatagtagaagtatagcactctgacccctagtggttaaattatgcagagaaaattcagcatttgtccaaagacaataggaggttatttcacatcatgttcctatatgatctttttatcagtttattaaagaacatcagcattcttcccttttattctctacattgaagcacccatccatccggggcaatttttcgtttctcatagatctagtatttctctttttgcccccctctattcctctgctgttaccatctttcttcttgggttcatccaacacctgcaaaactttcctgaaaaactgtttagttggccaggcacagtggttcagtcctgtaatcccagcactttgggaggccaagataggcggatcacctgaggtcaggagttcgagaccagcctggccaacatggtgaaaccccgtccctactgaaattacaaaaattggctgggcacggtggcatgctcctgtaaaaaaaaaaattaagagcacttaatagtcatacttttcactttgcttatatgtagcttatatatatataaatataaaaatctgttttaactctcattctactaaattcacctaatgttctacatagaaaatttcatgtatattgtttatcatctttcaagagtgaattaagcacatgaatattttctcatgaaaagggatattgattggtacagatgtgtatgtataatggctagttgctcagatcatcaactaaatctaaaacatgtgttccagctgggctggtggctcatgcatgcaatcccagcgctttgggaggttgaggtggaggactgcttgaggccaggagttcaagaccagtctgggcaacatagtgagactctgttgctgcaaaaagagttttaaaattagtcgagcgtggtggcatgcccctgtagtttcagctacttgggaggcagaggtggggggactgcttgagcccaggagttcaagtttccagtgagctctgatggtgccactgttctccagcctgggtgacaaagccagaccctgtctccaaaacataatcttaaaaagcagttcccaattcttaattttaattttatttatttatttttgagagagggtctcattctgctgcctggactggagtgcagcggtgtgatttcggctcactgcaaactggaccttctgagctcaagtgattctcccacctcagcctcccgagtagctggaaccaccatgtccggctacttttttgtttgttttgtagagacagggtctggtcatgttgcccaggctggtctcaaactcttgggctcaagtgaaacaactgcctgtgcctcccaaagtgctaggattacaggcatgagccaccgtgcctggccccagatttttataattttcatattttattctttattgattagtcactgagagggtaagaattgtgtaacttctttcttgtccatattttctcttcaatttttactgtgaaggccaacataaaatatttaaggcaaacagattttttttttttttttgagatggagtctcactgtgtcacccaggctggagtgcagtggcgcgatctcggcttactgcaacctccaccttccaggttcaagcgattctcctgcctcagcctcccgagtacctgggactacaggtgcctgccaccgcgcccggctaagttttgtatttttagtagagacgggatttcaccatcttggccaggctggtcttgaatttgtgacctcgtgatccacctgtctcggccccctaaagtgctgggattacaggcatgagccactgtgcccggtccaggcaaacagattttattccacttttccttgatcactcttttgttttttctctccaatgctttttctctatttgaaattttgcactattgttgctttcttctgaagtattcatatagagttgttaaaacaactgaagtcagactgcctaagctttaggtttcttctctgttaaaagagataacaagataataatagcactcctcatttatagggttacttatgggtggttattggcacacatttataagtgtttgaaaaaatcttagctttactattattttatagatttacttgcatttttaatgttcttggtatacaccaattggtttgtttacttattaccaaatatttataaagcatttagtgttatattgttggctgaaaaaacaggaacaaaataggatggtgtatatttatgaagcttaactctaatttaagaaacaaagcattatttttttttttctttgagacggagtctcactgtgttgcccaggctggagtgcagtggcgcgatctcagctcactgcaatctccgccttccaggttcaagcgattctcctgcctcagcctcccgagtagttgggactacaggctcatgccaccatgcctggctaattttttgtatttttagtagagacagcgttttaccatgttagccagtatggtcttgatctcctgacctcgtgatccgcccaccttagccttccaaagtgctgggattacagccgtaagccatcgtgcctggccttttttttttttttttaatctttttgagatggagtttcgctcttgttgtccaggctggagtgcaatggtgtaatctccgctcactgcaacctccacctcctgggttcaagagattctcctgcctcagcctcctgagtagctgggattacaggcatatgccaccacacccagctaattttgtatttttagtagagacagggtttcaccatgttggtcagtctggtcttgaactcttggcctcaggcgatccacccgcctcggcttcccaaagtgctaggattacaggcgtgatccactgcacccggacttactggttgcttttcaaaggttgtacagatactataaatatatttaaccaatactctattgaggaggagccggagagggtttccagtcttttgctattgtaagcaatgcttaaaaaaatactctggaacataggtcattgtaagcaatgcttcaaaaaatactctggaacataggtcattgtaagcaatgcttcaaaaaatactctggaacataggtcattatgtatatttctgtaagataaattcctagaggtagggttactgacttcaaaggatttagactaaaggtgcttaaagagagaggtttcacctgttagttagtttttgtagccaaaacttgaaaacatcctttcttcctcttttttcgtacctatcaatcaccaagtcttgctgctgttacctcctcaatttgtttaaatctgtccttccttcccattcctcccagccaacaactcaatttaggcttttactatttcttcatgtctgaaatatcgtcctcaaacccattgtcctgagagaataatctgctcgaacacattcatgttgcctactacatacatccaggattaagtctaatgcctttgaatacacaaggttcaccttgatctagtccctgtgcttccctttctctggtagacttctcccatcaccagcttcactctctttgcttttacactgtggaataattcatcatttcaggcctccttgcttttgctctggctgactctccagcttggaatgccttcatccatttcccttacttcacctttgtgttcctgtgcattcatctttcatagtgattgctattctctactgaaatgaattttttcaaaatagcctgcaattgcaataggcagtactttttttctttctttttagctctagcatctatcacagtgcttgtggtcatggggtacatactcagtaaaatatcttttactgaactcaactagatcttgggggaaaaggggtggagtcattcattcattcattcattcattcaacatatgtttattgagaagctataaacataggcacaaggttatgtgctaggtagtgcgattacaaccaagaagataacccagggcctacttttggtctagtgaaagagatggaattagatgggtatggtggtgtgcacctgtagtcccagctacttgggaggctaaggcatgagaatctcttgaggctaggagggagaggttgcagtgagctgtgatggtaacactgtactccagcctgggtgacagaagaagaccctatctaaaaaaaaaaaaaaaaaaaaaaaaaaagtagggcaacataaatacacaattttaatttaggtgggtaaagacaacagtggaccccagggcacagtttagattattttatggatatggataaacagagaaaagggtggtttttttttttttttttaaatctattttagagactgggtctcactgtgttgcccaggctgttttcaaacttctgagctcaagtgatcctcccacatcagcctcttgagtagatggatggcattttaattagatgaaattgtactaggaaaggcatttgcaaaacaaagtaattgccccaaatcactatgaaaccctaagtcaggcataaaactcacgatttctgacccttcttcatggcctattgcctcctattacctttactttttcaagtaaagatattcttctggtaaacacatggtcaaatacagtgtcttgggtaacgaatagtaaagtgagataacatatgtagagaaagcgggtgagaatccgtactccataaaagtattttctttccataggtgtctgctaaactgccatctaagttttccaaaacaaaaaacaaaaacacttgtgtggtgctcaatgatgtatattaagtgaaacctaccaactgacctttatcctttccttcctgtttttttaatattaaagaagagacctcttttcacaaatgattgaggaggctagtaaaatgcagtgaaaagagcaagttctttgggagtcagacagcatcggatccagcccagagcgcagcacgactagtagagtaacttagattaagtccttaaacttccagtgtcctcttttgtaaactgggaataataataataataaataaatagtgaataatatttatgcaaagtacttagcacagtgtctaacacataaaagcttaggagaagttggctattaagcatttctaggaacccgaggactcagggttgttattttagttcttggaatcaaaggaacttgaagcgtagtcattcctaaactaagttaaaccagaactagcgctttcagcaatgatgtaatttgatctcttcgggccaccgtcgctgagcatgcgcaaataaacgtggcgggacgtatgtgtcatggcgctctccatctaaagtctgtgcagcttccggagagtggcgggttgattttctcactttggactggtttttacttcccgacttctgggtaagggtggccgatgggtccatgtggggcagagtgtggccacagctccttttatggccaagccttgtttctccagtttcagtttttcttgggctgtttgcaaatttgtttcgcagttaaaaggggatttgccagctgggatgggggaattgggaggcagatggggcttccaggagcgaggatagggtcgttggcctcaggtgccgctctccagttaggagtattttaggcacctcgttccttattgtcaggtttaacttcatttgttctcccactttataccttagtgaatttgtagatgtgacaaggctttcgcagttatatagctttcccagatcagtatgttaagaatttaagcagaagttattgagaaaagcaggtgtcttgctttttcacttttcgttcttctttgctcataaaacctttttctgaatctcgggacgacagttatctttcggatggaacgtgatctggatgtctatctaccttattgacttaatcctgttttgtagtggttggttactcgcactatgcagacgtgttgcggtgctgaatacaacatttattactaaagccagacactggatcaccgtcacggcagatgtcagcacacctgttgtaatcagtaagaagttacaagtagtatggagcatcattaatcctgctgtataaagcagtcttttatggagtctgattccttttaagtaaagaatccttacagtggttttgtgaactttttgggtgcttacttttcctaatcaatttttattttccagactcatctttcaagaggactttagactaattgcagataattaaggtactgatttattttaaaccttttatgtttgagtgctgtgcgtatttctgcatgttagaaaatgcagagaggtagcctaatgttttagctatttgccactatcatgttatggaaacattgtgctttacatagcattaaatcgaagagatattttcatttattttacttaacctttcattttcattcaccagcattgaccatgtccacttttttgagatgcccttttcatttgccttccatggcccatggatttttttccttgtctggtggctgcttcttggaatccattataagctgattttcctttatctggcagttaaatttggagtctctcaagtcgtggtcttgtaccttctcctacctctgttctctttttcttcccctctgggtgatgtaatccacatgcctgtcaacagttatttgtctttttgattctacccatcctaatgggtatgaagtggtgtattattgtggtttggatttccatttccctgatggctcatgatgttgacatcttttcatgtgcttatcagccatttgtatgtgtgtgtttttgagacacggcttccctatgccacccaggccagagtgcagtggctcgattacggctcactgcagccttgaccacctggtctcaagtgatcccacttcagcctcccaagtagctgggactacaggtgcatgccaccatgcccggctaaattttacttttttttttttttttgtagcgatagggtccgtgttgcctaggctctggccttgtactcctggcctgaagtgatcctgccaccttggcttcccagtgttgggattataggcatgagcctctgcacctggcccatttctgtatcttcttcatctaatctgtttttccttttgttgcttgtgcttttcatttcttagctaagaaagaagggcctactctaacatcataaagatttgtgcttatgtttttttctaagagtttcataatgttagctcctaaatttaggtctatgatccattttcggttaatttttgtatatgatgtgaaatgtgaaatagggctccaactttattttttacatgttgctatccagttatcccagtgtcatttgttgaaaaaaaaactacgctttcccccttgaattgtctaggttatgtatatttgacatacattctaggtggtttttatgaaagaataattctgggacagtgattatcaaactttaattcagatcaaaatcacctagagggcctgttaaatattgctaggttttactcaaaatatctgatttagtatgtctggagtggagttcaagaattttcatttctggctgggcatggtggctcatgcctgtaatcccatactttaggggccaagatgggaggagtttgagaccagcctggacaacaaagcgagaccttgtttttacaaaaaaactgaaaaagaaaaaatgttcatttctaacaagttccccatgatgctactccagctgatgtggaaactacactttgaaaaccactggacattgctttgcaactgtggctgtacacacatgagaatgactggaaagtttttaaaagatattgatgcccaggctccattctcagagattcattcagctatcttggggcttagttgggaattttcttttttttcttttgtttttgtttttgttttgagacagagtctcgctctgtcgcccaggctggagtgcagtggcgtgatctcggctcactgcaagcttagttgggaattttcaaaagctcttcaggtgaatagaatgagtgttgaagattgagaaccattactgtggaatcgtggttcttaattagggatctatagtggaattacctggacagtttctatgttcacatacttcagttctactcttggagattctaattcagaatggaacctggagatttgatatgatgaaaagcttcccgctgggtgcagtggctcacgcctgtaatcccagcactttgggaggccaaggcaggtggatcacctgaggttgggagttcaagaccagcctgaccaacatggtgaaaccccgtctctactaaaaatacaaaattagctgggcgtggtggcaggtgcctgtaatcccagctactcgggaggctgaggcaggagaattgcttgaacccaggaggcacaggttgcagtgagccgagatcgtgccattgcactccagcctgggcagcaagagtgaaactctgtctcataattacaaaaaaaaaaaaaaaaagcctccctaataactcacctatgtaagtaaccactgctctaggatattgcatcctccttcttcctatcattttgagtattttccttttcactgactctatttttattccctttatcaaatttgatttcctctacctttgagaaaaatttttaatgatccttttgctccatttagctattacgctgctttccttttattctcaaactttcatttccatatgatttaattaaaaatttctgaaggctaaacaattccctctatcagtctatcagtttgttcaaagtaaaacctttagcttattaatagtgatgagtgagattatttaggtacttatgatatacagccaggtttatgctacataatgctgatatgcagcgttatatttatcttttttgagtgaatatctccaaatgaaattgctggctcgaaggatatacatatgtttggtataattgtcaggttgccctccagaaggggtgtaccagtttttctgtgctttcagctaacagagtttttgtcagctttgtatcagtgaggcagctgaaaaataacttattgtttcaatacttgttgttagtgtggttgagcattctttcctctttttttttttttcttttctgggtatttgtatttcttaagtgaactgcctgtttttcctttacgcattgttttctggaatgtggttacttattagtgtcacattagattcttgcattgtttgtactttgccagtgaggcaaagccatagtgggaagagcatggtattgagaggatgccaaggttctgatttctagctctatcaatgtacaaatccttttgcttcagtggactccagctctgtaagataagaagcttagcaacttctgcttctctaactctaatgatatgggatgtctattgcagtggattcctttcattcctctttttcctttctatttctcttcagtggatccatacacacttgtatatgggatggcaaaattgtgtaattaaaaaatatggcttttaattaatgttatttaattattcatgatctgtcagtagttcttccgcattccaaaggcactacctggtcctagcctctctcatttaattatttcatagaagagtggtgatagaagaaatcctaggggttgggcatttacttcagcttcccacccagtgtagaatttcctgctgtgtcatagaaagactagctaaattcaacttaagcattgtgttcattcatttagtcagtaactattgtgtgcctgctatgtgtcaggcattgttagaggtgttgtagagacagtactgaaaaagagatgatgcctttgtgcttaacaagcttacattgtaatgaggaagatacaattatatatgtggtgtcaggtaggtaagcacaatgaagaaacatgaaacaaaagcagggttagaagcagtgaaagtgtgggcatgcttgggcagcgtggttattttagataaggtagtaggaaaggcctctccgaggagatgttgtttgagtgaagaagtgggtgggaagacatacttatctgggggctgatattctggcagaggaatagcaattatgaaggctcccgagtcagaaactaatttggcatactcagaatatctatatccatatattgcccgactgtgtagtctgcagtaaaagtatttattgagaacctgcaatgtgctagacatagttctaggcacctgggataaaacagtgaacacctcacacgaaaacctttaccctcacgaagtatgtattctagtaagataaacagttaaaaaattattaaaacattttaagcagatgattaaatgctacagtttaaaaaaaggcaggaaaggggcataggaagagggtgtgtggtgaggtgggggtgttggttggaaagtcctctcttgttacacttgagcaaagtccttaagggcttgagtgagtgagccattcaggtgtcttaagtaagagcattccaggcaagaataagactgtgaaatgaatgcatatctagtgggtacgaaataacaaagcctgcatgactgaggggagcgtggtaggaagtggggccagagatgcagcaggaggctgattatatatgtcattgcagatctttgtagtgattttggctttttactctgatatggaataccactggaagggtttgattgagaagcttgagatgaacttaggttttaaagggatccctgacttctgtgctgaaaatgttcttgtagagtttaaggatagaagcaaggatattagggattgcaataatccagacaagaggtgatgttggtttggaccaagagtgtaacagtgggtatggtcacaaatagattctgaatatattttgaaggtacagccaacaggatgttgttgattgattggatttagggtgacagaaagaggggagtgcaggatttttggcctgagcagtagaagattgggattgtcttttttttttttttgagacagagtctcactctgttggccgggctggagtgcagtggtgagatcttggctcactgcaacctctgcctcctgggctcaggcaattctcctgcctcagcctcccaagtagctggggttacaggcgctcgccactatgcctggctaattttttgtatttttagtagagatggggtttcaccatgttggacaggctggtcttgaactcctgaccttgtgattcacccacctcggcctcccaaagtgctgggattacaaacatgagccactgcgcccagccaggattgccattaaatgaaatgggagaagttgtaagaggatctggtaaggtagggagaagatcaggaattctgtttcgactttgactttttttttttttgggatggtgcttcgccctttgtcgcccaggctggagtgcagtggtgcaatctcagctcactgcaacctctgcctcctgggttcaagcggttcttctgtttcagtctcccgagtaggtgggattgcaggtgcccaccaccatgcctggctaatttttgtatttttagtagagacgaggtgtcaccatgttggccaggctgacctccaactcctgacctcaggtgatccatccgcctcagcctcccaaagtgttgggattacaggcgtgagccaccatgcccagccctgttttaactttttaagtttgaaggaattattagacattcaagcagtggtgtggaataggcagttgaacgtctgagtctgaagctcgggggaagaatggggctggttatgtaagcatagacgtagttcatatttcaaggccatgggactggatgaggtcacctagggagtgcctgaaactagagaagagttcctgtaacagagccatgggggcattctaatggtgagaagttggagagatgagcagaggagactggagctaggagagtgtggcatcctggaaactagtgcaatttcttactgcagttcttcagtctttaataatgcacactgtgaatgggtaaggacgcagaattttctaaatttatttgaccacagaaccatttttttttccagataggtagtaaataattagaagcaatttgggaaagactaacctggttcatttcaccctacctggatggctgagttggccagggctcttttttgcaagaacagaatacccacctcaaactgatttaagccacaggctcgcatgactgggcagagcagggctgcatttggcttcaggcatttgttggattcagatgctcaaataatgtcagtatggttctttatctttctagatcttattaggcttcattccttaagtaggcttcctccctgtagcagacaagagggctctggtatccccaagttgacatcctcccaacttagccacttcagtgacaagagaagctatcttctgttaacactagcgtagaatcctcacagtgattcttattggctaggcttctcatgactgaccttgaactggtcattgtggccaggaggatgagttaccctggcaagcttgggtcatgttccccattccagtgtctagggaaagggaagtctgtgattgacagtcttttttttttttgagacagagtttcgctcttgttgcccaggctggagtgcaatggcgcgatctcggctaaccaaaacctctgcctcccgggttcaagcaattctcctgtctcagcctcctgagtagctgggattacaggcatgtgccaccacgcccggctaattttgtatttttagtagagacagggtttctctatgttggtcaggctggtcatgaactcccaacctcaggtgatctgtccgccttggcctcccaaagtgttgggattactggcgtgagccaccgtttccggcaattgacagtcttaccatgaccacgtggtacgtatgttaactataatccagccaatccttgatggattgatgtttggtttatttctaatctttggttcttactgacaatataaagctagctgagatttgaacacagatttttcggatacccagtgcataatttgtcatagctgtaatgaatacattacagaggaaaggagcctggctggctgccactctgttaattgaatgatgtgaatggaaggatgggaatccagcaaatgagaaggaaaattcatcagaaagctttgaggacaactgaaagaatgtaagatccttaacactgcaactcagatgaggaacagtggtcattcaatatacacatactaagtaggtagtagagtaccacacagtgcgtgggcttggactcatctgtcatggtatccttgtttagcttctttgggcaagttaatttatctgtgtttcagtttgttcatctttaaagcgaggatagtaatactatctacctagtaagagttgttgtgaatggttgatgagatgaccctataaaggacttgccttgtgtctggatatagtattagtggtagtactatcagtaagtatatacgagtgtattccccccccatttttttcttaactattttattctaacataattaccgctttacctgcagttgtaaaacttatgcagagatccttgtacactttacccaggtctcccgttggtaacatcttgcaaaactacaatacaatacagtatcacaaccaggatattgacattgatacagtcaggatgcaaaacatttccatcatcacaaggattcctcatgttgctcttttatagtcatacccattctcctctcaccctgttctttctttaatccctggcaactactattctgttctccatttccataattttctcatttcaagcatgttatataaaagtgatcatacagaatgtaaccttttgggattgaatttcttcattcagcataattctcaggagagtcatccaggttgatgcatatgtcattagtacatttctttttattgctcaatagtgttccatggtatggatgtaccacactttgtttaaccattcaccttttgaatggcatccaggtggtttccagatttgggctattacaaagaaagctgctgtgaacattcatgtacaggtctttgtctgaatacaagtctttatttctcttggataattgcccaggagtacaattgctgggttgcatcacagtcatatgatttgtttaagaaaacaccaaactgtttactggagtggctataccatttttcattccctccaggactgtatgaatgatgcagtttctttgcatccttgccggtgtttggtggtttcactgttgtctgttttatccattctgaaaggtgtatactgatacctcattgtggttttagtttccatttctgtgcttatttgccctctgtatattctcttgaaatgtcttttgtcattttctttttacggttgtgttttgacactagttctttgtcagatatgtggtttgcaaatattttcttccactctgtagtttgactgtttgacttttcagcctcttaatagggtctttcttaaagcaaaagttttaaattttaatgacattcaatttattactttttctttttatggattgtgcttttggtgtcacatctggtaactttttacctatccctaagtccagaagattttctcctgtgatttttttctaaaagttttataatattatgttttacattttttttttttttttttttttgagacagagtctcactgtgtcacccaggctggagtgcagtggtacaatcttggcttactgcaacctctgccttgtgggttcaagcaattctcctgcctcagcctcccaagtagctgggattacaggcgtgcaccaacacactcagctaattttttgtatttttagtagagacgcggtgtcaccatgttggccaggctgttcttgaactcctgacctcaagtgatccacacgcctcggcctgccagagtgctgggattataggtgtgagccactgcgcccagcctatgttttacatttaagtctatgatccattttgaattaatttttgtataaggtgcaagacttaggtcaaggttcattttttgcctataaatgtctgcttgctccagcacgaattgtttaaaaagcaatctttcctccatttaattgcttttgtggaatatttgtgtaggtctgtttctgggttttctgttatgttccattgatctatatttctatccctctaccaataccacggtctcaattatagctatctaataagtcttaaaattgggtagaccaggccgggcgcagtggctcacgcctgtaatcccagcactttgggaggccgagacgggcggatcgcgaggtcaggagatcgagaccatcctggctaacacggtgaaaccccgtctctactaaaaatacaaaaattagccgggcatggtggcgcgcgcctgtagtcccagctacacgggaggctgaggcaggagaatggcgtgaacccaggaggcggagcttgcagtgagtcgagatcgcgccactgcactccagcctgggccacagagcgaaactccgtctcaaaaaaaaaaaaaaaaaaaaaaaaaattgggtagaccagttcttcttactttactcttctcaaaattgttttaaatatattagtttctgtacatttccatataaaatttaggatagtcttatctatacctacaaaaaaatcttcctgggattttgatagggattattttaaacttgtgtatcagtttggtctccactgacactgcaaaacttcattactggtcggttggttggtttgaatgtccaggatccctccaggtccttctctgattctacactagtggagtgtgttggggtgcttgattgtaggtagaagtccaagctctccccacttggcctttgtagcgtgcctgggggtgggattacagttttgtgtgtgtgtgtgtgtgtgtgtgtgtgtttgtgtttggctggagtagaatgattattatctaaaacttttctgtcttcctaggctgccctttgtatagttctttaacgagaaagcaggcttttattggggggttttattgttggcatctcttgccatttctgattgctgggatctttagtgagctgtaggaggcagaagaaaacccaaggaactcatcatattccttgggtcctgaggttcatagccagtctgccttatgcttgttttatatataatgtccagagttttatttgtattttgctggcggggcagggaaaaatgtgcttatcttcttgcaagctgtgtccacattttcttcttttaattataaaaattttgaatatttagaaaagtcgtataggataatgaacatgaacctatctagtttctagttttaagagttgtaaatgcttttcagtatgtcttaatctattttttcttcttttttgagatggagttttgctctgttgcccaggctggagtgcagtggtgcactctcgactcactgcaacctctgcctcctgggttccagcgattctccttcctcagcctcccaagtagctaaaactgcaggtgtacaccaccatgcctggctaattttgtacttttaaaagagatggggtttcaccatgttggccaggctggtctcaaacgcctgacctcaagttatgcgcccacctccccaaagtgctgggattacaggcataagccacccaaagtgctgggattacaggcataagccactgtggctagccagtctattttttctgaggtccttttaaagtaaattatagacataatgacatttcacttctaaatattcaatatgcatctctaaaaaataaaatttttgaatataaggacaatactttatatcgaatgatttataataacttcttcatattatctaatatccagcttatattctgatttccctagttatacccaaaatttcttatagcttgacagacaaagaagaaacaatcaagaacatgaactgcattttgttgttaggcttttacgcttcctgttatctgaaacagttcctctcctactttttcctacttgacattgatttgttgaagaaatagttcctgttgaaccttggaatgtcccattgtcattagggttttgtctgattgtttcattgtgtttcttttttcaatatacccaagatagtacttcatccttgtgtttctttatctcttgtattttctataaatttgaagttagatccaaaggcttgattagattcaaatttggtgagaatatttcataaatgatgctacgctaagcagattttcataagttgattttatttataacttttatgtggtagagaatatgccttctgcatcctgtgatacactactggatgacatcgaagatatcgtgtctcaggaagattcaaaaccacaagataggcattttgtaagaaaggatgttgtcccgaaggtacgaaggcgaaatacccaaaaatatttgcaagaggaagaaaacagtccaccaagtgacaggtaagcttttttccttgaaattatattcattttctttttttttcttttgagacagagtcttgctctgtcgcccaggctggagtgcagtggtgtgatctcggttcactgcaacctcctcctcctggattcaagctattctcctgcctctgcctccctagtagctgtgattacaggcacacaccaccatacctggctattttttgtatttttagtagagatggggtttcaccatgttggccaggctggtcttgaactcctaacctcaggtgatctgcccaccttggcctcccaaagtactgggattactggcctgagccactgagcacggccgaaattatattcattttcattccagggagaagctgacgctactggtctgtgtgatatatataatgtctcttcattagaatctttgaacttttgataggaaatacaagttgagtatcacttatctgaaatgcttgagaccagaagtgtttcagatatcacatttttttttttggatttcggaatatttgcattacatactttccagttgagtattcctaatccaaacatctgaaatgctccagtgagcatcctttgagtatcattttggcactcaaaaagtttcagattttagagcattgtggattttgaatttttgaattaaagaaactcaacctgtatgtagattttttttttatttgaatgattttaaatttggcaaggtaattggttaaaaagaaatgagatgtcaaattggatgttcctagaagatagcctcgggcaatagggatctcttgggtattactgtagttgatatgtaagtctgtgttatttccaaataaaatttttaccagagtttgtgattcttatgagacagtagtattttggacatttgaattttcttagctgattttcaaatacctgtggatcaggtaaaggcagtgggcacaaataaattattgccctatttacgctattatagtagatctctagtccgtgaaattttgatacaacctaaccagaaaggataatgtaattatatggttttaataagcctatatttgtttatctagtcaactgctgaactttataatctgcttattttgttgggaaactaagcttttaaattcttggaatttaaaatttgcttatattttaatgactgaagtttataaaatttgtcctaaatgtgtccttaaggtaatttttatttacttataaattattagagcaatccaagttgaaagtccttttttcccctaaaagttatttttagaactctgattttatagagtgcttttaataatgctttaggatgacggtttttaactttgattaagttacttatatctgtaagttttaaggaagctacagattgcaactagtatgtaggaatctgtaaacagacatacttttctttatttgccattgctgctagaaccactttctttcctattgttatttttgtgtacctttccaggagttgaacttagtaagttagtagtatgaatttaaaatgcaattcagagaaaaaggatatttttttatgtggagtgttaactttttagaattctgtggttattttatcttgattttagacttttgatacaacaacagattttgagttaagttggtgcgtttaatgaatagcttttgaatggattgtagtgagtttgttttttgtgtaatatatcttaaaatcatctagtggtttttattttaaaaataactcaatgaggttgggtgtagtggtggctcatgcctgtaattccagcactttgggagacaaggtgggaggatcacttgagcccaggagttcaagatcagcctggacagtatagtgggccactgtctctacaaaaaataagaaaaattaacaggtgtgttggtgcatgactgtagtcccagctacttgggaggctgagatgggaggatcccttaggcctgggaggttgaggttgcagtgagctgtggtcacacagctgcactgcagcctgggcaacagagcaagaccctggatcaaaaaaaaaaaaaatcactcaatgaaacttacttttttttttttattgattccttaacagcactattccaggcatacagaaaatttggatacgaacatggggttgttctcataataattcagatggagaatatatggctggacagctagctgcttatggctataaaattacaggtaatgagatctataatatattttattgattaaatttttcagaattaagcttttagagataaatagcctagcagttaaagggtattttagcatgacagtgattttaaggtgaaacagatagttattacacattttgtagataaccatggatgtcatatttaaaaaaactttttattttgaaataagtttagactttcagaaaagtagtaaaattagagagttcacatatgcccatcaccaagcttcccttgatattaacatcttacgtagttgtaatatcattaataaaccaggaaattaacattagtgcatttctgttatctaaactgtagatcgtatttgaattttaccagttttcccattaacttcctttttctgtcccaagatctaatgttgggtcccaccttacatttagtttcatgtccccttagtttcctccaatctgtgacagtttcttaattttttcttgtcttctgtgaccttgacacttctgaagaaaacatttccttgatatttctgatgaaaatgattattatgtagaatgtccttcaacttgaattggtctttttctcatgattagaatgaggttctgggtttttggcaagcagagaacagaagcgatactatatttttctcagtgcgtcatatcggggtcatgatgtcagtgtgtcttatactggtacactaacccatgtctgctaggtttctttccaatacagtcactgtttttctcattacaactaataaacatcctatttctcctcaacctttggcctgttaattttagtatctactggtggatcttgtctgcaacagttattactgtggtgtttacttaatggtgattttctgctatcttgttttctttacatttatatttatttatttatttatttatttatttatttatttatttactttgagatggggtctctttgtgccccattctggagtgcagtggcacgatctcagctcactgcatcctctgcctcccaggttcaagcgattcttctgcctcagcctcccaagtagctaggattacaggcatatgccaccatgcctggctaacttttgtatttttagtagatacggggtttcaccatgttggccaggctagtctcgaactcctcagctcaagtgatccactcgcctcggcctcccaaagtgcggggattacaggtgtgagccactgcgcccagcctcctctttacatttattaattggagtttttctctaaggaagagctgtccattcttctccatcttaattaattaattaaattttttttttttagacagagtctcgctttgttgcccaggctggagtacagtgttgtgatctcggctcactgcaacctctgcctccggggttcaagggattctcctgcctcagcctcccaagtagctgggattacaggcatgcgccaccacaccaggctaattttttgtattttttagagatggggtttcgccatggtagccaggctggtctagacctcttgatctcaggtgatttacctgccttggcctcccaaagtgctgggattacaggcatgagccactgcacctggcccgtcttagttatttctatcagtacagactcatggatatttattttatcctgtggatatagtctgatactatcattatgtattatgctgcttgttgttccaatcttggccattaggatcttgttcaggctggctcctgtgtcttttcagcatgccggcatcttttttttgagcacttctttatttcctggcaccacaaaatgttctaatctctcatattttcccttccccagtcttggaagcaaccagttttccaaggagtcctgatttttttcattaagagaatggcatttagaaaaggggatctgggcagtcaatatgcttgctcgttgccaccgtgaggtgtcgctgttgtgaggtcctcttgggggatggagctaggaattatgtatgaatagtaacccacacatatgcacgcatctgtagctatttctgtatctattatgtgtactaaatggaactataattcgaatgctttgtgacaggcactgacccggtgctttatgtatgttatcttgcttagtccttgagtaggaggaaatattggcacccctactttacagttgagaaaggagaggttgtgtcttttttttttttttttttttttttgagacagagtcttgctctgtctcccaggctggagtgcagtggcgcgatcttggcccacagcaagctccgcctcacggttcaagggattctcctggctcagcctcccgagtagctgggacttcaggtgcccgccaccatgcctggctaatttttcatatttttagtagagacagagtttcaccgtgttagccaggatggtctcaatctcctgacctcgtgatccactcgccttggcctcccaaagtgctgggattacaggcgtgagccactgtgctcggcctgagaggttgcgtcttatcttaaatcacatatgcagtgaagtcctttgtcacttccaaacactgctcctgaccattgttctgtacctcatggctgcctttgcatgtgtaattggcaagtcctagctataagacagcatgtaatgattaaggaggattggaaacctagtccttgtatcaccctttttccttcagtaactaaaatatctttttttttttttttgagacggagtctcgctctgtcacccaggctggagtgtagtggtgcaatctcagctcactgcaagctccgcctcctgggttcatgtcgttctcctgcctcagcctctcgagtagctgggactacaggtgcccaccaccatgcctggctaatttttttgtatttttttagtagagacggggtttcaccgtgttagccaggatggtctcgatcccttgacctcgtgatccacccgcctcggcctccccaagtgctaggattacaggtgtgagccaccgcgcctggcctaaaataccttatgttattaattttgtattttttataacatattctttagatggcaaaatgagtcttaatatttctgtcctttaagttaaaaatggtcaaaatatgctttcagaattacttctctatattcattagtaatttttagtataatttagcctgggcttgccttaccatattctgatggtgtagtttgagtattaagaaaatagaatttatttattgatttatatttatttatttttgagacaggtctcactatgtttgcccaggctggccccaagctcctgggctcaagtggtccttctacctcagcctcccaagtagctgggactacagttgtgtgcctggctaagaaaataccctaaggaaaaaaaaaaaaaaaaggctgggtgtgttggctcatgcctgctgtaatcccagcactttggaggccgaggtgagagagggtgggagggtcgcttgagcccagtagtttgagaccagtgttggcaacatagtgagaccctggccctgcaaaaatatttaaaaagtagccaggtgtgttggtctttgcctgtagtcccagttacttgagaggatgaggtggcaggatcgcttgagcctgagaggtagaggctgcagtgagctgttctgtgcacagcacttcagcctgggcaacagagtgagatcctatctcaaaaaaaaaaaggccctgagataatttcctaaaacataaggaaaatcagatattgactttttctatgtcatattaaatatctaatacattttaattaaattttaatccattagcagtttgtgtttggtcttgtaacagtacttgtctgtataaaataacagtcctggtatgtttatacaagaatattaggttttgttttacacacctaattttgtttcttatttgggaatagttaaaaagagaaaataaggaagtaattacttgaatgggaattttttttttttttttgctaatgtagcatagtctgttgcttttatatattatatgtatttgtattaattttataaactattgattgttcctactttagaaattcatagttgttaattccagcctggcttgcatgcagcagactgtgggaatactttcttcactagtctaggtgctataggcccaggaaatataaacagaattagctttgataagacatttaagaagtaaatctctacagattttatatttaaagatttgatatgaatgacttctggattacctatgccagtagtcactttcattactatggaataatgagaatgtataaagtttattatggcttactagttgataatgttttcgttaatcaaatggaaacctaaaatattaaatgtataacataaaataggtataaaatataccttatgtataatgtatagggagtttattgaaaacagtatgcagataaattatatcaaaattagttctcagtagtcatagatatttttatcatttggggaagaaagattatgtgggtatgtatttgaaattgctgcttttaaatatgcaaattcaggatataattattctgtgttaatacttcataaggccaggtgtggtggctcacgcccgtaatcccagcacttaggaggccgaggtgggcagatcacctgagatcaggagtttgagaccagcctggccaatgtggcaaaaccccgtctctactaaaaatacaaaaattagccaggtgtggtggcacacacctgtaatcccagctactcgggaggctgaggcaggaggattgcttgaacccaggaggcggaggttgctgtgagctgagattgccccactgcattccagcctgggtgacagagtgagacactgtctcaaaaaaacaaacaaaaacaacagcttcataaagcgaactgtcagagcagtttgctgttgttcattgcctcttttcaaacccttttttattttgaagaaaaaggtggctcataacttttttgttacgtagtctcactccgctgcccaggctggagtgcagtagcaccatctcggcttactgcaacctctgccttctgggttcaaatgattctcctgcctcggcctccggagtagctgggattaccggtgtgcgataccatgcctgactgattcttgtatttttagtagcgatgggggttttgccatgttggccagactggtctctaactcctggcctcaagcggtctgcccaccttggcctcccaaagcgctgggattacaggcatgagccaccgtgctcggccagcttttaaatgattctcctgcctcagcctcctgagtagctgggattacaggtgtgcggtaccatgcctgactaatttttgtatttttagtaacgatggggttttgccatgttggccagactggtctaactcctggcctcaagtggtctgcccgccttggcctcccaaagtgctgggattacaggcatgagccactgtgtttggccaacttttaaataaactattacaaaatcgtgcctgcttgtctctcattcaaagaataaaacttactgaggagaaatgatgttagcccctaaaactcagaacaattacttgtatcgtgggtacatggatatgtgatataattagattagtatcttgggaagcaattaaactttccctgtgagcaccatggctttttaaagaaatgaatgtgttctccaagtaggcaatttttatagattaaactttttttccagtcatcctttgtttattgtttttggattatttctttgggagatgttggtaaattgttttcagtgtgctcattggtggcaaatcttcatatcttgagaatacatttagtattagaaaatggccacaggtcatttgaggccaaatctggtgaataaaatatgtgctatgatgttgcacaatgctgttctagttgagaataaattttgtcttaagtgattctgaaatcagttcttaaagagttctgaaagagtagctgtgattcttacacgtttttggtctcttcagaacctcacaatccttacacaattttgttaaggaattcgtaaccactccctagcctgatagtggaataaaggtttaggcttccaaggtgactgctttgggaacagccctcatttagatacagctgtgttagatacagctgtgttatgtttagtttgcagccatgcctggtgtgaatgaatattgtatgtgttttttggttagttggaaaaaaaagtccatccaaagaccattgactgaggctgtggttcataaacactgaagagtaatggtgttatgtgtacgaaatatttgtggacatgcttacctaagtcagaatagagtgtttagcctgggtgcccacattttcagagcagttatttaaaaattgctgagctgttaacattcttgatagtttctttgtatatgtgtttatagtttattcatttggcaaacattctctgaacatgatatatgttacagagtagagtgctaaagaggtgtaaagatatgaaattgaaccagccatggattccagcagacaagaagtttattcttttttggcaaaggaaaggccttcatattctgtgttaaatcctagaagttgttttaggaaatacttaagctcataatgtattctttcactttttgtaatatgggaggtaggacctgctttatttttttatttttatttatttttattattttccgagatggagtcttgctctgttgcccaggctggagtgcagtggcacgatctgggcttactgtatcctccgcctcctgagttcaagcaattctcctgcctcagcctcctgagtagctgggattacaggcatgcaccaccacgctcagctaatttttgaatttttagtggagacggggtttcaccttgttggtcaggctggtctcaaactccttacctagtgatctacccatcttggcctcccaaagtgctgggattacaggtgtgagccactgtgcccagccagagttgtttttttttttttttgagacggagtcctgctcttttgcccaggccagagtgcagtggcgctatcttagctcgctgcaagctccgccttccaggttcacaccattctcctgcctcagcctcccgagtagctgggactacaggcacccgccaccacgcccggctaattttttgtatttttagtagagacggggtttcactgtgttagccaggatggtctcgatctcttgacctcgtgatccgcccgcctcggcctcccaaagtgctgggattacaggcatgagccactgcgcccggccccagccagagttttaaaatatgtaacccttattagaagcctttctcgtttttttttggtggaaagaagggggtatatatcccactgcagtctataccacaggaacatggtcagtctgttaatttcagtgctgagttgggatttgaaagtaagctgtttcttggccgggtgcgatcgctgtcgcctgtaatccctgcactttgggcggcctaggcaggtggatctcctgaggtcaggagttcgagaccagcctggccaacatggtgaagccccgtctttactaaaaatacaaaaattagcctggtatgatagtgcatgcctgtaatcccagctactaggaaggccgaggcaggagaatagcttgaacctggagggcagaggctgcagtgagctgagattgtggcactgcactccagcttgggtaacaagactgaaactccgcctcaaaaaaaaaaagtaagctgtttcttcagttatagatagcagtgtcagcagagtgctacctggtccattcctacctccttaatcataagtataaagtaattgatccagtggaacctcaataggatatttttggaaattctagtggattcaatgaaagaatcatcaactatcttagtatagggctgttaacttatactttctacacataactctttaatctagctttcttgctcctttactatcaccatgattatttacatttatatagtgtcttacagtttgtaacatacatttagctctgctaattttgtatagcttgtacctgaagataaaggaaaaacaaaatgttaacttaggccttacagaaattatttaaaaacatcctgacataggccaggtgtggtgactcacacctgtaatcccagcactttgggaggctgaggcgggcagatcatgaggtcaggagatcgaggccatcctggctaacacggtgaaatcctgtctctactaaaagtacaaaaaaattagccgggcatggtggtgggcgcctgtagtcccacctactcgggaggctgaggcaggagaatggcgtgaacctgggaggcggagcttgcagtgagctgagatcatgccactgtactccagcctgggcaacagaaagaacgagtctccatctcaaaaaaaaaaaataaataaataaataaataaataaataaataaatgaaaaataaataaatacataaataaataaaaatcctgacattaaggtttctgacttaaaattatatgtgtaagtaataagtatttacagtgaagtgtttagttatatattgaatagaacttttaaaaaatgtaacccagggttttcttgccaaaattctttattctgtagccaaagatgatgtctgttgttaatatcttaaggttctgaagtctacctggaattatagtgcaagtaaattgtagtctgatcatgtgtagtatctgtaatgcaaggtgtgaccatcagcttatagatatagttgaatcttagcattattctaaggcttggaagttaaacatagaattatatacagagaaacaaagcctttcatacattaaaatagaaactatttctgctgatctgtaaaatgtccttcttgtggatattttcagataattttccaagcttttactatatatatgtatacatatgtatatatatgtgaatacatatatatgttttatgtactgcaaaactgtagtctcaagatcattatttaaaagtacatccttaacatggctgggcacggtggctcatgcctctaatcccagcactttgggaggctgaggcaggaggatcgcctgaggtcaggagtttgagaccagcctggccaacatggtgaaaccccatctctactagaaatacaaaaattagcccagcgtggtggtgcatgcctgtaattccagctactcaggaggttgaggcatgagaattgcttgaacctgggaggcggaggttccagtgagcggtgatcacaccactgcactccagcttgggtgacagagtgagtgagactccgtcttaaacaaacaaacaaacaaacacatcaaacaaacaaacatccttaacttgccagtaattcactcttacttttcttcctgtggaaatgtgcttatgttaggttatttgcatgaactgagattattaagttctaatatttttctgcacattttggccactattatttcatgtagaaagttgagagaattttattcaaagctgcctttgtgtgaggatctgatagcatagaggtagtagaaatagacattttttaaggggtaactcccaacaaaataaaagcgaagtaccagttgtggcagggatgacagtggttattggatcaccgagctgtattctttctatcagctctctccaagggactcagctttctaggagggggagatggaaatcttaaacaggtttgatagcttccctaccttttatctgcccagacaacaaaaataaaacagctcacagtgttaggatttggggtgataaattaatttggagatatctaaatgtaaaatgagatttctgggcacatggcagtgcggtctgtatgataaacaactggggttgaaacagtaagtgcatgaactagacagactctttttgaccagaccttgtgttataggtgaatgaaatttgggaatcctatacttggaattctggaatggctagcctgggccaggaaaaatcactttgtaatctaagaaggaattgagttaagaagatttgttcatcacaccacatttccatgttgttgaggaaaatagattggcagtggtgacaaggtcaaggatgtgttgttcgaagttgtagaagataagcagcaatttaaaggcgttacaatacatttttaagagtggaaattgcattgaagagtggaagaaaagtcgacataagagaattagggcatgttgtttgcccaggctggtcttgaactcctgagctcaaccaatccacctgcctcggcctcccaaagtgctgggattacaggcgtgagccaccgtggctggcccttaatatgttttaaaaggatgtttaatactcttcattactgtgttatgcaatagttgcatgatgatttttctgatctctacattctattttttttctttttaaaatggagcacagaagtacttagtttctgatgtttttccatcttggcccagtaatttcctttttttttgttattttatgaagcacaaaactaaatatttttgaaccaagagactactgtgtggtattaattttgattttgtactaaattcatgttatttacacaaatcaaatagtgtcaaccttaaaatttttttaagcaatatttttcttatgtttgagagttaacatgtatggttgattagaatcttcaccttctaaagggattaaggaaaaacctcgttcactgttgtgaattctaaaatgttttggttccaagtcctagtttttcttaccctggtattatgtccaaaatgaatgcccactaaaagttagtaactctcatggcaattaaagtattttgataatgtttataagttcttgttctcaattttgccactagtaaagatgtgggagaagttaatctttttttgttgtctttcttgtgaacttaaagatcatttttcatcctgttcaacctttggcctgaccttttcaggtcactaaatgtctggtttgcacttcttgtagcatgtgagaaataatacttcaaaattcaagtgtaattgtattaatttttgtgaataaactgctatggagtgctgaagtgtgttaagatgcctagtcttttcagaattaccggcattatggtattgaacttaaaatattttatgtttataatattttagaattttcatgagtcagataaacatatacccagattttcagaaacttgacatttgcttaattgcttaataattcacatcaggcttagagatttgtgaaatatttttgggataatttatttagaaatagcgtgtgtttaaatattaattttcttttttaagaaaatgggcagatgataaattaccatgaaagcttcatttaaaaatctgttgttagtattgtcttctttaattttggggagaaaaaacttctgagatgttaacaattgaacatgtagtgttggctctttttggccttcaatttaaaattgtcatgtgtttggattaaagacatgatgtatttttagctattgggcaagagatggcaatattgcattacatgatcactgcagttacactattataaatgaaagtgaatttcatgttacaaatgttcttctaatgcaattattaggcgtcattaaattagtttacactttatttcttctgattgattttttaaaaaactttttagcagtatttatataaaaattggacaaattgaccctttcagaggcagtatgaccctttcagaggcagtatgatcttgtgcagatacccgtctgcaatatgtgtgctgaacagatgtgaaaattatttagtcactggcttactgcttgacaccttcattgctctgttgccctgactgtgcttgtcctagaatctggttgttgtcctctttgtccataggagcatatgaaggtgggagtttttgaatttgaggacaaacatttgttacctttaatactacattgctttcatactcactaaaaactaacctttgcatagtatgcaacttgtatagcttattaatcttcaagtctattaacatataatatggttaaagaggcttaataataaaacagaatgtagtaaactactgcatttaaaaatttcccaccaattcctactttaccagcatatgtttgatggttaagggggaagtgatttgaatatctcaggatttgcagagactttgcttttacctcttctttcattgtagcttggtcattctcaaatttgagtttctaaggacttttaaagtgttacgtatgctaatccatgtatacattatttttatgattgattaaggacttttttgggaagagttgtggctatacatgatttttacctaatctaatcattttagattcaaactccttgcataaaatgtagctctgcttagcactgctgccattagcttatttctgctggcttagagtgacgtctcggctagttcctgtgttaagataatttaactggtttacattttcttttttatgatgtgtgagttctttctgtctttctcatctttacctttgacatgtcagagacactgttgcttagttattaagaacagactgtcagccgggcgcagtggctcatgcttgtaatcccagcactttgggagcccgagaggggcggatcacctgaggtcaggagttcgagaccagcctggccaacatggcgaaaccccatctctactaaaaataaaaaaattagctgggcttggtggtgcgtgcctgtaattccagctactgaggaggctgaggcatgagaatcgcttgaacccaggaagtggagattgcagtgagctgagatcacaacactgcactccagcctgggcgacagagcaagaccatctcaaaaaagaaaaaaaaaaaaaaaaaaaaaaaaagaacagactgtagccagctcttaatattaagccagactgtaaaaccaactaccaccatttattagctatataactttgataatatctctgtgtcttagcatccttattaaatgaagatggcagtggtagtcctttctgaagattaaatgaatcagtatatgtaaagtggtcaactttgtattttagtattataataattattagatatgatacctggcacaaagtagtaattcaggtgtttttttgtgtgcattagtgaacaagtaaaaacaagtatatttcttgaatataatgtatagaagtaattttattctttttatctttaagttagaagaaaaattaaagtatattccaaaggttagataaatgcagtgtgtatgggaatcccttgagtttttcagtaaaattctatttgggtggctgtcaagtccagtctgcatagtcttgacatgtcttggataagatccttatactatcacttttcctgtcatggacactacaaattatattgaatcagaaatctaatttaatccattcttattcaattggaagcagtaattgctttcaatttaatgggattggattcagtattagaaattttgatgttccttcaaacttaatacagtatggttatatatatttccatttatttgtgtgtgttcctgtgccctcgcagagagattatcttggagtattacttgtattcacttgagttatttgcaacggttggtaaagaggcatattgtaagggtgggaatgagagtggcattctctttgttttttttcttttctacccatggaataatgaagagagaaataataagggccttcaaaatgggatttccatccactcagaaataaggaaaggaaatttagagtctctggagaagatctggaatgctatttactcttgagggtagacagcatccagccctactaaagatgaaaaaaggagagcctggggatgaaattaaatccatcaaaaaattcactgttggtcaggcctggtggctcacgcctgtaatcccaggctgaggtgggcggatcacttgaggttaggagttccagaagagcctgaccaacatggtgaaacctcgtccctactgaaaatacaaaaaaaattaatcggctatggtggtgggcgcctgtaatcccagctactcgggaggctgaggcagaagaattgctttgacctggaaggtggaggctgcagtgagccaagatcatgccactacactccagcctgggcaatagagtgagactccatcttaaaaaaaaaaaaaaattcattgttagcatgttatttcaatctttcccggcaaatcatacttagagacagctaagtttatcaattctcatgtcctatacggtgctttttcttgaatatacggtagacaagaggtaaggcctaatgggtgaagtaactacatttctgagttagtgtctaattgtttttgatcacctagttccatttgacagaagatgtagtgcttatggctcatcccattgactctttctctgctttcactccttcagcagtgttttcagtagcctttttggtgatcttattgacttgtcttttttctgatgttctttttaattgaattgctatatgatataagatggaatgattgtgttttaaccatgatcttcaagtctgctgtgtaaagaactaatgattgcagtttgagtaaaattcttagtaacaagtgaatcaaagataaagatagatcattgagaatattttttttctctccatgaggaagttcattattagctagcttacaaaaatgaaggaattgtgagagtgttctggaataaatgttatggcttaataaaactattcagaaaatcactgaacaatacaaaagtggaagacattgaaaatggtatatggacacatctaagatcaaaattaagccagagaagctttagggagagtatttgaagcttatcatttccatttgtaacggctttttatattgtggtgtaaaatcatgtgcaagccataaacaagggcttttaaaaatatttttgttaatttttttttagttttatagagatggtgtctcactgtgttgcccagtctggtcttgaactcctgacctcaactgatcctcccatctcaaattccctagtcactgggattacaggcatgagccaccacacctagccaacgagggctttttttttttctcattaacatagagatatgaagaatactatattggattaaaagtttttgcatttgtgaagtgtaagcagctgtgtgaatgtagtcaatgtgtattcttcatttaataaacataagtatcttttcctttccaaattatacaaaaaatactaaaagcaatcaaacgatttttacagaatcttaactaatataaaaatttgttcattgcttataatacagaataattatataacttggctcattatctaagcttaatgaattaatgttggaatgtaaaaacgagcaattttaagccagcgatggctcaatcatttttaactgagggattttgggatcaattactaaaatgttctgagcctcagtgtctttaaaatgtaatgatgctctattaatctcatgaaattgaagtgaaaacaaatgtgaggtaatatgtttttggaaatatttataagtttaaaaatagcctgcttggtacttgtgcctgtaatgctagctactcaggaggctgagacaggtgaattacctgaggccaggaatttgagtctgtcctgtgcaacatagcaagaccccatctccaaaaaagctaatatatttataaagcttaaatgttataaaatgataaactgatggtttttgaattctttgctctactcacctttcatctgttaaagatgtttttgtacaatttagctcagttcctaaatataccaaaagatggcactgtttacctatgtttaatattttaatttgcattttttgatgaaaaagtgtgttgaatgttttatctacaaatgttttaaattgaggttatttttttacatttaattttctgttttgtaaatggatctttaattcatgtaaagtttactaggaccaggtttcatttttattttgaaatggtttggaaattcagatatttaacaatcattttgtagatataaactcctgtgtgatccattgtaattaatgataaaaccttgtattaatgtgacagctaatgtttcatggaaaacctagttgcttttgtataacaaaaaccattaaattttttaagcctctgaaaacagtccagtgattaaaacatgacagccacaaataaattatttatgtggcttttaggtcacactgcccaggtttattcattttagaaagttattttatcttaaaagtacctttgaaaatgtagcaaaacctttcattgcttgaatttcctactcacagttgtgtgatgagaggagaatctaggtccaggtcctgcgaagagcttctctgggtgagaaatgcaaaaattagataatatgaatttgacttgaagtgagggttatttatatagcaggatgtggtgaatacacttcccatacagttagacggaaacctcctgattgttcatttatacagcctattacatccaatgtagtttatgacctagaaagagaatacaagtaggatatttttttatcccatcaaagctatctatatatatatatatttttaaatgaacagcatttgtcagtgatttttacaggggtgaaaaagcacaagacagttccattactattataaaatgttttacttttgttgtgggggtaagtttagaagtccaagatataataatttcagatgtgcttctactgtttcctttacttaaaagtagggactattttgaggcaatataatttgtatgtttcagtttttatttctctctgaaaatcactttttagggtaccatgccttggaaagaaagtttacatttttttccgttaaaaacccatcctcctaactctgaaatgactgtctcagttactaaatgtatatagcttgggggaagtgaaggcacagttggcagttagaggtttgtttttatgttcatgggagtatatgtgcttatatttaaatgttcactcttctagcagggtttgttgatgttagtaatatgctacatatgcgatttgtctgaattgtttaaaaatgcataattacaggaggatttgattattcagcaacagttccagtagctaaagactatcatatagatattttcttccagtatttgacagtggttctgtgagctatgagtagcataaaaaataaaaagaagatactgtgactctttaataccctagaggccgtagtcttaggatattcttactgtagagatgaaaaaacagggcttcattaacaaactgaactgctatttcacctcttttagtagatgtgtaattctgtgggtttggtaaataacaaaggcttttttcctaaatgatttaatgctttcagatttttgtgggaaaattagaaaaagcaaaaatgcactcagtgattttttttttaaacccctttgtttctggacaaatggacaaagatagttaagtgtcccaaaaatggttttaacaggcttccctctacaaccccatacataccctggctgtccataattccaattttgggtaggtagtaaaatgtgatattagactacgagtattttccctccaaataatacttgtgattaaaagaaatgcaatcaaatagcattatatattcgttatgaaagaaagatctgtcatgcagattttgcctggttcctttagatgccttgtaataatgtgctaatttatgctgatgatcttgcctcatgacccttctgtgtggcctagatatgttaatatgttatagctttttaatttcgatcctctgtgttggttgaatatgcttgttagtccatagtgccactcactagtctgtgtcaagaactgaaaaagaacaagaaaaatgtatctcagaatcaatttctttaagcatgtatcagtaatggaggaaattataaaatatacataattttaataggactttatgtctgaacattcattgaaaatagtaagcactctaagtactgtaagcttttaattaggaaagagagttgggtcattggttttattaagcaagggcttattaacatcttttgattttttttcttgatttttgtttaatatcagtgagaaaatattacaagaatgaaaactagacatcactggcagtttttactttattgcatccatttttctgttccctaaaccttgagggttatgcatctaaagattcccatggtaggaaaatactgtatgtggttcataaattcatgaccttaaggtagcagagaccaaggcctaaaatagatgggagaactcaactgtttaaaaaaatttgttaaaataaaaattccatagaaggaaaacaatttatgtaccttaaatataattcatctttattatctttcctcatctacagaagcttctccttattacttatttgtgttctttctacagagaatatactaggaggggtatttttccttatttttagctcttgatctgaaagtgtaatgttcttttcgctttgtcttgaaattgttgcctccccatttttgggtctcatctggatctgaaagacattgactgactcaaatatccgaaaaacttggtaactttcaaattggtatacgtggcataattaagaatatgttggtgcaaaagtaatcgtggtctttgccattgaaagtaatggcaaagaccacgattacttttgcaccagcctgtatttcacaaacgtctctgtgcctgtgattacttctctctaaaatggtttatggagtagttgttatgattaataaatggttgataaatactagctattatggtattaagcattaataaggaaaattcactattacatgtaaatgttttgagtccctgaaattaactggcaacttaatgaaatttgatttaagcacacatttagtccatttcaatctatttaaacgtgtttctctcttgcacatctttttctgatggagagcgtgagttaggaaatgagccaaaataggatatataatggatagcctcttttggtagccagtcagacagaatggggtgatgtcttcatagaaggaatatggaattaggagttggaagatttggggtcttgctccaaagatcactttgattgttggtgaacttatttatctagtctcagctttttaattaattaattaattaattattttaatttagagacgaggttttactttgtggcccaggctggagtgcagtggcatgatcatagctcactgctactttgaattcccaggctcaagagatcctcctgcctcagcctcctgagtagctgggactacaggtgtgcaccaccatgcccagcaaatttttttttttttgagacggagtctccctctgtcgcccaggctggagtgcagtggcgcgatctcggctcactgcaagctcctcctcccgggttcacgccattctctcacctcagcctcctaagtagctgggaccacaggcgcctgccaccacgcccggctaatttttttgtacttttagtagagacgggggtttcaccgtggtggccaggatggtctccgtctcctgacctcgtgatccgcctgcctctgcctcccaaagcgctgggattacaggcgtgagccaccgtgcccagcacccagctaatttttaaattttttgtagagacggagtcttgccattttgcccaggctctcctccaactcctggcctcaagggatcctcccacttcagcctcctaaagtgttgggattccaggcgtaagccactgtgcctggcctattcttagcttttaaattctcgtctatgaaataacgcatttgactgttccaaaagtgtgggggacaggtcatcttctttcacatgcattgtcttactttgtaaggtaaataaagtactatattaagaaatgtgggcctggcacggtggctcacgcctgtaatcccagcactttgggaggccgaggcgggcggatcagaggtcaggagattgagaccatcctggctaacacggtaaaaccccgtctctactaacaatacaaaaaaaattagccgggcgtggtggcgggcgcctgtagtcccagctgcttggaaggctgaggcaggagaatggcgtgaacctgggaggcggagcttgcagtgagccgagatcgcgccactgcactccagcctgggcgacagagcgagactccgcctcaaaaaaaaaaaaaaaacaaaaaaacaaaaaaacaaagaaatgtgaggtgtgaaatccttcttgaacatttttaacttcactcctccctatgctgccactctgccccctcatcagactcttccttaacacactgctgtgacccagattgtctttatttcttcttgtagcacttgttagactctattgcaattatttatgtatttgtctcattagactgatcttgagtacagagatggccctttattcttgtattcaaagtacctaccaccatatttggcttataataagcctcagtgtttgttgaatgaatttatatcaatatccatgccattcatgagaaacaaaacttattatatagagcatagaggtggtttctaattcgtgttgctcttatttttactgttagatgtaaaacgttgaatgatttgttaccacttggcataattaaatttagcatttttctagtttaagtagttcagtttttgagacacttttatgagcctcactatattaatggccttattggtgctttacagattttgtgattcatgggcactgtaagtataaatttcatgcttacagcaattgaataaaataggcacattgttctttgttagtttcttcagttggttcttttaattttcctgttcttactggtgattccttgaggcatctggccagtgttgagtatttcttcctgactcatcatcccttctgccacctgccaaaggaatgcttttactttggtcaagagcatttcgagtgagttagatttcattattggtgtaggctatggaccacctgataagtctaagcatgtcatactaattagcattgactgccagccaccataatgcttaattcaggtgctatgctgttttaattctaaaggtgttgtgaagtatggaaaaatcctttacctgaatatgaaactagctactaaatttggagttctctccctacccctgcagcattttcctttgtgtgaaatttcagttgattatattcaatttacttttatatagtctttcagaatcagtagaatttttttccttagatatatctaagtcactcctttttgagatgatttagaaaagaggaaattgaggattggaagttaaaaagggagaaagatggctggtaggtaacatgtagaagttttaacctttcatctcaagagagtgattcttctgggctttaatacgtgtatctgagagctgggaggaagctgtgttggagggtgtctgggacctggtgagacctcagaaaataagagtccatcataaagtaagaaaggcattgatgggacttaaaaatatttgactacagcgaaagctttttatttatttatttatttttatttttaattaattaatttttgttgttgttgttgagacggagtctctgtcgccagggtggagtgcagtggcatgatctcggttcactgcaacctctgcctcttgggttcaagcgattctcctgcctcagcctcccgagtagctgggactacaggcgtatgacaccacgcccagctaatttttgtatttttagtagagacggagtttcaccatgttggccagtatggtctctatctcttgaccccatgatccatccacctcggcctcccaaagtgctgggattacaggggtgagccactgtgccctgccaattaatttatttttttgagacgaagtctcactctgtcgcctaggctggagtgcagtggcgtgatctcagctcactgcaacccccgcctcctgggttcaagcgattctcttgccttggcctcccgagtagctaggactacaggcatctgccaccactgccagctaatttttgaatttttagtagagacagagtttcactgtgttggccaggctggtctcaaattcctgacctcaggtgattcaactgccttggcttcccaaagtgctgggattacaggtgtgcactgggtcagctttttagaatgcattttatctgctgcaagttaaaagaaatttactagcctttgaatgaaactgtagaaggaaaatcctgaattcctagatatcaagggatggttagagaacccccaaaagtgccgtattgatcattacaaaaaaaagggtaaaatgtacccttatagtctcttcatttagtgcaatatctttattgtggtaagttatagattattgataggggcttctatagtttatttttctacttttggtctccttatcctatcttcccactagattaaaaaattctccccaaatatattctgctgtggggattttcagaaatgttagcaccctcactggggaggaattaccttctacctgtatttctggaaggggaagcttatgtgaatctctaaaaagagaattatattgatgttacgaagtaagtactataggtgaaagagagaataagaaaaaactcgatgtttaaaggagcatctattgagttactctgtgcaaggctgaccaactcaccttgtgatcttagtcaagccatgtaatctccctgagcctcagtttattcatatataaaataagcaagttgaactcctctgttccctggttctttgtaaattcattcattcttagatattcatcataagcctgttgtgttatgtattcagcagttgaacaagacagatgcagtcttatccttgtaagaagacttctctttcccctatctctgctgacctgtccttctccctgttctcttatctagtaattggttggataatgaggaagtgaagcaatgtgaaatgcttaattacaaatttggggactctgtctgcttttatggatgaagtggattgacattttggggggaaaagtaccctgtaaaaacatagtttatatatattaaaaatgttattaaaatgaaaaagtgatttatcagttagtggtaaattaattggctgacttgggagtgaaaattatttgacttgggagacaaaattactctctagactgagctagagagtaattttgtctaaattgaggtatagcagatataaaatggaaaagatttatctttgatgttgagtaattttaaaaaatgcatttgagcttcttgggaatagttacccatcttgatgtatttgctgaagatcagatgtaattttaaaaaaaatttttggtagaaaaatgtctttggtataagtcaggcctattatcttgagatttatgcctttattctggaaaattgaaatttttatctcataaaagaggaaaataatttgaatggagttaataaaaatgaaaggagtaaaatttcacttagaaatacagtgaggcatccaaaatgaagaaaaatcccttatttggcttctagatctaaaatgatattctaatctatgcaggttggttcaagagcactttacccctgttggaggcagccaggttagctttattgaatgtaaatctctgacttctcccaagatacccatgaaagcaactaaattcattggttattaggcagcaagagtaagttcaattttctctacacttgtgacaattagaggttggttctagcctgtctaatgcttaagtttcaaggctacctgtatttgagagctgttttggggagataaccttgtaacacatacattttaatgagtacattacttttaccacctgctgaagtcgacttggagtgactactgacctgaagtgaatgcctgtgttcaatattaatatggcatgtctggatccagacagcaatctttcattttgacatgcacatagtcaaagtaaattaatgtttaaaacccaaacactttaagttcagccagtgtgtgcattccataataatccttcagaagcagtttacatagaaatgctgagtgctttcttatactttatttatcatatgtattgggtccacattgcagtacttataacgagatttatccagtgctgtttttgttccttgttttgtggaggctaaagaagttaatttatttcaggatttagtctctgcatattttaagcaaaattatacttaaaaatcttcatgtgcctggcaagatagtagtctaatttcagttatattatttttagatggaaaaaaaaaatcaagctaattgcatactttatttctgctcaaatgatcaccaatttttgaaagtatagtagtagtttaaaaaaagaaaaaaactaggcccagatatagtgtatgtttgtgactacatgtaacaaggatattgctgattttccttttctctcatacataccattttctagtcttgcttttattggttagaaaacattcatggcagatgtagtaatggggaaattatattaacatttaagtattaaattagcttgtagccagagtctccttctaatatgatgacatttagcaagttcaggattttaaggaccatgttgcgcaactcattgttacacatttcctgtttgccttttttgaaaaagtatctgagatctgttttttcagattggaaatttccattgtggatttcaatgttgttgttgtcattttaccttgctggtcagtgtttgttatttatgtattaagaatatgtagtatagtgaccataatgagaatagtaggtgattggagttgtatgcaaatgacagttttcataacacttttgcagtttaatttcaacaaaaacctcaagttatatttattagcaaacatatttcagctaaggagttttttatgctccaaaaagatggcagatggaaatgaacctaatatgtgttcaaagaaagtatgctgcatttatttcaaattgtatctgatacatcagcatgatgatttatatgttgtcttagaattaaagtagatgccatacttttactgtaaaagtcaaaattagatttcttctatatttgacagaatttattttctgttcataaataaatatagtatttggtttaggatgtagaacatcaaataacaactgttagattatgcttaatatatttatcattttctgaattttggatgttcttaacatcagaaaaatatgtcctttacccatacagtgactttagattggatttggaagcattgtacagagaagacctattgttcctattgaataaggatgccgtacagagatgagctttttgacccactgctcttccagtagtaatggatttgcactaatttgagcagagtatgccacttggtcctgtttttcagttgtcctgtgtgatggctggctagcaaaatcaaacatctgcattttgactgtggaaggcagtataactagctggctcatactggttcaaatttgcaacactgatatggttagtattatggtgtcactacctgaattaagtagttgtggctaaattgtttatattatatgaacatattcgttattattctgcatggagaatttttgtcctcatggattgtttcataaagtgttttattagcttggattaattggaaaataagctttttaatatggacctctcccctagtcagagactttgcaaatgatttctacaaaaataaactataaaatagatgatataatggggcctattattcctgatttgattttaatttgcttccttttataatttttccacaataaaacagagcctctcagaaagtaaaaggatgtaatcctagctcagatggtatagggtccttatgtcttgagctattatgatggaaggtacccctatacctccactgatagaaatatgatgggcagacattttctttggtgaaaagtagttcatagtttactgtgatatccactccttggacttactttagaggactgtttactgagggcaaaatatgtgcatgattacatataatcaaggttaatttttatcaagggtcaccatgtttttgctatggtctgacaatcatgacctacattaaaagagccctgtgggtctgtctggtgtatttttgcttgatgtctgggtagtttatttcagatgcttgtcagtttcattatatatttttgtttggggctcttgctggattttcaggtacaccataaaaacagttctctttgcagttagattgtcatgaaatagcttctgttttatggtatgaaaacactctttaatcttgaagggtgagtaattttgggaacattttccatttggtggtgtgttatgttcaaatggtaggttattttgaaataggatagactttgcagctaagattccagatttagttcagttaattcattctttagtgagtttttcttgggaaaatattttggaattttcatttcaaatgcatcctcctcatttaagaaaaatccagatgagtagtttatttcacaatataataactaaataggatttataaagcagaaatttataaatcctttcttttgctgggacaaaggcaatggtgaaaattaaaaaaaaataaagttaggacatttaggtaactcaaagacagaacttaatggctgttaagattggagtatttggttttgtagtttttaaaccatatttaattttggccatatctatcttatttagtagtttaaaggataaacagttcaaacagtaagaaaaaagcagtttgtgttttgtcagttttcaactttagatatcagtaaatcattgctgtagctttctttatcttttgtttgcacaaaaaacctgttagaattatgtctgcggggaccatctgctgtggttcccagtcttgtcagtgtgataagggataagctgtataaacaggggcaccacaaaaaaaaaaaaaaaaaaaaagaaagcaaactgcttttagaagggaaaaagtatccatttaattttataacatagccacagaaattcatatgatttttctcataatctatcagaattgaggttgtaatatattttttcagaaaccacaggtccaagttatttctatggtttatcttcacattaatattatatctttttgattacagggtttctattttggaggtcatagcttttaaaagttcttcgaaaatatttcagtatagcacttgacattgcaatatttttcacattgtctgcttagtttctggatctttttttccctagccattaatttttctttcagttgaatcctcagaaatcatccttttcctgtttcatttgcaaggaggtcatgatgcttcgtaaggaacaaggcagtcatttccatggcaacacactctatcaaaacatcacaaatctgtcgtgccccttacctttaaactctcaaatgctaagaggaggaggtgtgtaaggagcagcattgttcttacagcataactatacgatcacaaggagagggaagtcaattaattgactcaaaagtaccttaagttgacttagctatagacatatatatgtaaggaatttatcttttatattgtattaaacagtgttttgaggatggaaaaatgaacattccaaaactctgatttaaagatcttatttagtgtctgtgagaactgtaaaagaagaataaatagctgagttatgtcatacatgtaaacatgttacacagttactccagtcatgagaagtctacctttgcctggaggccccagcacatgtctctgtcagtcattttggcttaagctaggatattttcagcatgatagtgacacctatcttttaaacaagttccagaattttgtcaattttctttttctttttaaccattaagaggaggtgttagcaagatggcgtgactcctggatatggaataggagaacaattggtgtttcatcattactgaaaattttatgctctttgaaatcaggtatgaagtataataaaaatcaacagttttatgagattttgtggtaaagcaattcttattttattaacttcaagtcttctgcattttcagcatttcattttattctgtagcatttttactcctgggtaatgcatttatttgtgtgacctgtgaagatggtaaattttgcaatgcttagcgccttctgtttccccatgttccttgtagcaaactctatgctagtccttatcatagaacctacctattgtactttaggagtcagctcacaggactgacacctcccacttgactgtagccaccttggaggcaggagcttgcttttctctgtgtgtggcgtggagcaggtgttcaataatgtttgttgagagaacagtggtcagaatgaatggaattagttgtttgtgataatgtttattttctctatatggcacaggtatatatatattttaattttttactgtgtatgtctaaaatgaggttgaaatatgttctccatacccattttgtatttaacaatttttttgtagtgtattttgaaatcttggtaggctatttccttttgccttttcaggcctccatacactcctattacaagaggacttctgtctctgttccacatttcccttcgttgttggcgacctaaccttggtgaccgcaagcgatcggttgtgagagaaagagctgtaagtggggaaggctttccgagtctataggtactacctggtggcagtattaacacattttattatgaactatttgacagagaaaaggattaagagaataaggaccagttatatatcacctactcagatttagaaatgaaacattactgatatagctgcagccctccatgtagggggcgggggttaggtgggagtatatttttcattttcactttgtacctttttgctctacaaaagcttcagacttcaaaagaaatctttccttgctctgtgctttcatagtactaccccaggcctaagtgtattattgaacctgccagtgtattataaccatctgttcagatgtctgtcacctctaccaggctgtacttcatctttgtattttcagtaccgtacataatagctagaatggaataggtgctcagtaagtgcttgttgtgtgaatgactgaatgaatgaataggtacaattcttttctcaaaataccatgttaatgtaggattctgtttagcaaaactatttccttgtctagcccatagttacagggccttggtgctctgatttgaacaaattgaattaaacataaaatcctgtagaacagatgcatttacaagtctctgctcacacagctgctggtctatttaataaaaacattgctgttttgattgggtattcatagcctttctttttgttaactctattagtatcatggtataagcagactacagtctagggaagatgagtggaagaatgagccagtgatcagaactcagagagacaataggagatggatgtcaagaagatggatggggaaaatgttttagtcttaggtgtagttacaataaaaagaacaaatacatgtatttgtcttccctggactatatgtcataaatctctgactccatatttcttatgcagttattgtaaccttccttcccctaaaccacctaagtatgtataacattcctactctaaattacaaaaaatcgatactgatgcatttgctttttaaatttttaaaaattcaggtataatttatatccaataaaatgcatagatcttaagcattcagttgagtgaattttttttcccatttatgcacctatgtaaacactaccccaaacaaggtaggggatatttccatcaccccagaaaaatttttcctacctctctcccatcaaccctccttttcccttcccctcccctctgcagcagccactttctgattctgatttcacttgttcttgggagtcatatgaatggactcatagtatgtacttttatgtctggcttcttttattcaagatactgtttttggattcatccatgttgttgcatgtataaattcgatttgcttctagcaacagaaatgtgtatactagcaatcaaatacaaatttacttttaccttaaagttgagagattgagtagtgcttttttaagaggattgttagtagacttccacagcaactcacatatattgagtgccagtccctacgctcagtgctttacacacattatcttatttaattgtgttttgtgattgtttgtttagttgtttacttaattctctacggcagacatgttcggtgaaagcattgacatctgatgaagaagttgacttggtgtttgacaaaagaaactgtcttgtgatataaaattctgattgttttctcaggactaagtactaagcattgtttatggcaggcatcgatgagcttaaatcatgaaacaggaggaaaagtgtaaaaggacaatggaagagagttactgggtgggaaagaaagaagtgcagtagctagtttagattcgtcttatacaatctgtgatgaaacttttgagacagagtctcgctctgttgcccaggctggagtgcagcagcgcaatctcggctcactgcaacctctgcctcctgggttcaagcgattctcctggctcagccttccgagtagctggcattacgggcctgcaccaccatgcttggctaatttttgtatttttttggtagagacagggttcaacttgttgccctggctggtctcgaactcctgacctgaagtgatccacctgcttcagcctcccaaagcactgggattacagatgtgagccactgagcccggcaaagttgcctttcttcatagaagaaagttgcaaaatatacatgaatgaaagtatattacatacaatacggatgcctgaaaaaaagcatatgtaaattgtgcttagcctctcaaagatgcttgtaatcagtgcccttatttttgttcagaattatatcaacctagttttgagtttttacatatagcttttgttttaccagcacatatgtaatacctgttatggtgccagttcattgtcctaattgctttatgtatattaattctcaaaactctgtgaagtgggaattttttctgttttttagtccctgttttccccatgaggatactgatgtaatacgaagttaaagaactggaccagagtcacataggtagtgcaagtggggctggaattctaacctggctggtctgatttcagagcccgtgctcttaatcactgcaccgtgtgcctcagcctcccctctccctaacatgctcctcattcgtccttgatcctagggatgatgctggttgagtatttcaaggtttgtaaagattgacagtatcaaaacagatgtagcaactgggactttgataatttctataattcacaaaatagatcttaaaattgcatagttctgttttttgtaggggagggaaggatatgtaggaagggatgatttataatttgaaatctggcagcagtagagcacgtaccttaagcctcagcaaagctaattacataaccaattttgtgcttattcaaggctgtatttatagtagattggtgtttctgggctagttggtcgtagaccctgggagtgagagaccatagggacggtctgtgaatgtacgtatgtttgaattaggcaatggcaattggaagtattttattaccacatgaggtcctggtactcagattgggcacacctgcagtaggttgttgacatttgtgaatctaacatttggggtttcaattattttcaagcccccagaaagtccatgacattcagtagtttgttatgaaaataatatcagtttcatagagttgtggggttctgagaattaaataaaaataatgtgtgtaggcgttagctgctggaaggctggaatacagattctagtcatttggtgagtgagtgaacctagcagaggtcctcccgtgtctgcttgtgacattctgcatttgggagtctcaggatgcatcagtgactgtgctgtcggtgcactattatggccacttctcatccttgctggactgtgagtcttctctagactcagggcttcagagttacttctgcccctgtgtccttcatggaacacttactttttacttctgtttggtctttcaatataaagttcctttatttttaattaccaaacttccctctccaggttataagtaaggtggtttttggccatcacctttcttagctatgggttaaagcattctgggtactattttctcctttttatcaccatgccatagcccttgtgtctctcccttcaactcatggttaggttggtttcattggcactttacttttttttttttagatggagtttcgcttttgttgcccaggctgaagtgcaatggtgcgatctcggcttactgcaacctccatctcctgggttcaagcgattctcctgcctcatcctcctgagtaactgggattataggcatgcgccaccacgcccggctaattttgtatttttagtagagatggggtttcttcatgttggtcaggctggtttcgaactcccgacctcaggtgatccgcccaccttggcctcccaaagtgctgggataacaggcgtgatacttttaatttttaaaccttaaaatacattattaatttttccaagagaagccccgatatttttgtagcttggcctccagagcctcagttatccctgatgtagtagatcatctctttgcttccaactaaagtggagcattggatgttgtttgttaaggagtgattttcccatttactaactcataaaatttgctgactgtgttttttggtaagaagtcttataatgctttcaatttcataagagtcattttcatagagtccatgcaatatacacttagagtgtaaaagatactgagttagatgctgtaggggctccagaaatgaagtcctgtctttcattcttacaaagtgttcatccttttaagttccttgttaatgtttggggcaaactaaatataattttttggttagactttaggtaaatatttgaagaaaaattttatatgctatattaaatttttattttatcacaagtttcattaactttcacttttaatgccattctttatgaaatgtcagtgttaaagtgaccccagtagtgtgacaggcaaaagggtcagtaatgatggcttctttagtagccttcagaactgagcagtttgagattaacagccaatatgaactgcctgcagtaatcattaaaatataatctccagttttggtatgattttacgtatctataatttataataaatgtcttgaagttgcaggtttttttcctttgcaatgaatcaataaattatgtcacaacccttaaccccaagtttttgctttagcaattcaggataatgccaaaaacttacttagcttttagtctgtgccaggcattgttctgaacaaggtacatacaatgctgtcttgtagaccctggatttggaaagcccccaatccctttataaagcatatgtataagttgtatagataagtgtattttcaaaagtaaacatataaaaattcataattgatatttgaggatcaaatattttcctcatttatgtatctaacccacaaaaatttaattgtttataagacattttatggagacctttacatttatatgaagtaaaatttaatatgttccttaactatccaatatatttgagtatctgtgagatatgctatgtgctgagggatacaattaaaaaatagaaaagatttgattcttgtctttattttttcaattatttcaggtggcaaacacagatggtcacaatataatgtgacacctccattttcccaatgagaatattaaataaattgttttgactaacttgaatatgtaaactttagagatgaagatgaatttctgtatatttatttaagttatacatacatatttaaaatagcattatatgagataattttcaaatgtaactcttctctcctggcttttcatgaagcaattttatctaaactcttcaaatgcatctttgacatatgagggtttttttcctctctagaacctctttttgagttgtctgacacagttttctacggttccatttgaattgtctgaaatccaacctattttgaatctatttacgttgtggtcactggaaattttctctcaggagcccctccattctcattattaaagatcagttggttttctttttcctcctgtagaagcatgtatgttgatctctgtagtgtaggcacttattataatacttaaaaaaagtcatttttgcaaggcttgtttacaatgaaatccaatatttgccaatgtgaggcaatatccctaggagttaaatctgtgttaaatctcatcgcagcttttactgcaatttttactgattcagatgattgtttctgggggacttctctaagcttccacagatcctgttacttagggtaatgtcttctccaagtgatactctgttattcaaagtaggactggagagagtaaaaagaggttctggtaataagaaagactttctatggactttattaatagaaatagaaaacaatttcctattttctgagggattttttttgggaaaagtaaactttgccttacacttgggcatttgttgagttgccagctaacatctcttagcggggagttggtagataggttctatttaacccagtgtttttcatgctgttctattcaccactgcatactgctttgccttgccgtgaagtgtactctttttacccaattcctcattttcatatttctgttttcatagtatcttgttagacttttacttcttgagtcagatgaagaaaacttaatcagtattgatgtcttcagtatcataaatatctgtaactcttactttgaatgtaagagtaatgttctgattactgctaagattctaccaaattgactttcagtacatattgatgtatttctggaatgaatgttcctgtgatcttggcttgcagatgaaaaccttaatatttgaatcagactggtgcaatgtggaaagacaaaatacacacttgaaatatttgcatgataatctacggaacaaaaacatttagtgggagtggtggtagaacgtttccaggatcaacacttgaatgctgtgagagaactatttttttttttaatggatggcaggtggcagagttgaaaaacaggtttttataatggaaatgctaagagtcttagctataggagtatgaatggtattgttacaatagatataatagatgtattgcattatcttatctcatcagacacttttgttagtaaaagcgcccccccccactagtttcagtctgctcttgcagagaatcactcctctcaacaatttttgctacttacaaaatttttgagattcaagatatctttaatctgtcgagtttcagcagatttaataagcataaatttattttattaaaaatattttaagtcaggaaagtaagtataggaaacagaccagatgtaattcagattacaggatctggatttgcccctttaatgaatgtcagctatgctggcaatattctgctggtttcctttttttttttttttttaacattactactcatatttcacatttgatttgttttcaatatccttactcttaggaaggggcttaggaaattgaattacattttatatgtttagttcctaatctcattcttattttaatacctgttcagattcttaaggctttttgtaaataggggtctgtggtgtctgtaagtctgggggcctaggagggagtctcacacaggagtccggtttgatcacagtggatagggtactctacagtgtgcttaaaggcaagggggctctaagaaagagcagccctggtcagtgtgttctgagaaagcagggcagtgtctgagaggtgagttaaaataggagtgagtagtcaccattttgggatattagacaggaagtgctttctgtacatgcaggctggaaatgcacacaaccctcctgccccatccgtgagcagtccagtgtggggagaggaaggaaggtgggatgtggttggtcataactgtgatcccttttcttctctataatgctgagtgttcacaattgagaactgactggtgagtccttggtgagttaaggcttaagctgaggtccctgggtagttaggtagttctaagaatgtatttgttcaatagaacttttgaataacttcacttagctagcttgttagtgctaggaacccaaagatgacaaacagcccattcctctgaaaaactgtgactctggtgaggtgcatagttatttagacctgccggatgagaataccacttttccccgcaccaaatctacctgctggagtgaatttatttcatgtagactctgaggtccctctgttgcttttgataacgtgctctcatctgaggccagctccgttacttgtatactcatcctgtctcccccgccaaggtcattgctcctgcagttttctgctttctctgttggatcattttccttctttgctggatcattcctatcatcaaacattctgtgatatatcctaccttaagctaatcttgtttctttttttttttttttttgagacggagtctcgctctgtcgcccatgctggagtgcagtgacatgatctcggctcactgcaagctccgcctcccgggttcacaccattctcctgcctcagcctccccagtagctgggactacaggcgcccaccaccatgctaatttttttttatttttagtagagatggggtttcaccgtgttagccaggatggtctcgatctcctgacctcgtgatccgcccgccttggcctcccaaagtgctgggattacaggcgtgagccactgcgcccggccgataatcttgttttttgacaccacattcttactctccaacttcctgataccacgttcttcctctccaactattccatttttttctttctctgtaatagcaaaattccttggaaggacctgctgcttctctttctgtttctagttcactctacggaggcccttttacttgaaagtgctctcatcaagttcaccaatgacctttgcttggccaaatgcaaatgccacttctcagtccttatcttatatagtctttgtttgttagcatttgccacagcttttcactctttccttctggaaatactgtggccttctggacactactcccccttgcttattggttctcttcctatttcactggctgccccttcagtcatctttgctggttccttcttatcataccgaaatgttggagcatccccaaggcactttgttttacttttccacctatactcacttatttgggtttttatagagtcccatagcttttaggtactttctctatgctgatgcttttttttttggaaccctgggctctctgcttacatatcatctgaatttggatctttaaaaggcatgtctatttaccatgtccaaaactactaatctcccccacaaatctgttgctccatgttcttcatatctcagtaaaaggattctgagtcttttcagttgcttgagccaaagactttggagtcaaggataactacttgtttccacatcacacactgagtctatcagcaaatcctgctggctctacctttaagcatatccataatcctatcatttttatcaccttcacttaggctaccactgtggtctaagccagcatcatcttgcctggattataatagttacctgttttatctcctagcttttccctcaaccatctgttttccacacagtgatcagagattcttcgaaacctaagtcagattattttacttttctgctcaaaattcacaatgctgtctagtacaactttctgcaaaaatggaagtgctcggccaggcacagggtggctcactcatgtaatcccagcactttgggaggccaaggtgggtggatcacctgaggtcaggagttcgagaacagcctggccaatgtggtgaaaccccatctctactaaaaatacaaaaattagccaggcttggtggccagtgcctataatcccagctacttgagaggctgaggcaggagaatcacttgaacctgggaggcggaggttgcagtgagccgagatcacgccactgcactccggcctgggtgacgagtgaaactctatctcaaaacaaacataaaaaaaggaagtgctctaatctgtgctaatatggtagccactggccatgtgtctgttaagtacttcagatccggctagtgcaactgaggcactgaattttaaattttattttaattgatttaaatgtaaatatccacatgagtggaagccaagatttatatcatgttctgaggtttacaaaggccagatgaagtgaacaccttttctacttctcttgacttcatctcctgctaccactgccgccctcattttcttgctcttctttgaatataccaagcatatgcttgcacttgctattccctcatgcctggaatgttcttcctccaggtgtttttttttttttttttttttttttgagacggagttttgctctttttgcccaggctggagggcaatggcaagatctcggctcactgcatcctctacctcccgggttcaagtgattctcttgccccagcctcctgagtagctgagattacaggcgcgtgccaccacgccccgctaatttttgtatttttagtagagacgcggttttgccattttggccaagctgatctcgaactcctgacctcaggtgatccacctgccgcagcctcccaaagtgctgggattacaggcatgagctaccacgcctggcctccttcttttcattttaggggatgagagttcgaagctaacagataataaaacttataaattatctacaaaccaagaatctgaattgttgaaattttcactttacaagagaagatctagttaggtttatatgataatcttgaactgctacaaaacagatgctgtgggctgggcatggtggctcatgcttgtaatcccagcactttgagaggctgaggtgggaggatcgctttagcccaggagtttgccaccagcgtgggcagcgtagtgagaccctatccttacaaaaaattaaaaaattagctgggtgtggtggtgcccacctgtagtcccagctactctggaggctgagatggcaggatttcttgagccccagattttgaggctgcagtgagccatgatcatgccactgtactccagcctgggcaacagagtgagaccctgtctgaaaacaaacaaacaaacaaaccgcccccctcaaaaaaccaactcaatacaccagaaccaaaaaccaaaaaaaacccccagaagttgggtactgtggctcatgcttgtaatcccagcactttgggaggttaagttgggcagattgcttgagcccaggagttcgagaccagcctgggcaacatagcgagaccctgtttctatgaaaaatataaaaatttagccaggcatggtggcatgcacctatggtcccagctgctaaggaggttgagtgggaggatggcttgaagcctgggaggtggaagttgctgtgaggcaagatcatgccactgcactccagcctgggcgacagagcaagaccctgcctcaaaacaaaacaaaataaaacaaaaacaccacaaaaaccaaccaaacaaaaaattgttgctgtgggaatatttgatgggtttaatacttgttaatatccagtagagataattaaggctgatccttgattccctttccctagcattttattgtggttcatttaggtgttctcaatgttgagtgaacttttcaaaaatactcttccttctctataacccaaagagtatattcttcaaagctaccttctacatgactccctcacccaaaaattcatctttgtttctagcagcctacgctactcatttctttgagcccacctttgaatttaggacttgtaaaattataaacatttataaatgtttgatctctatgtccatggaacagctttaaaaatcttctttaatctctgagatgaggcagtcaagaataaggcatcttcgattacagaatctctttgaagttttctttctatttcaggttttccctctagcactcctacgttcggtagctctaaggtggatttttttaattaatctttttcctttttgcttaggtatccttggcagtctttcaaaagttaagaggcaacattagtaaaattatactttcaaactttatcattttcgaactctgtttctctagtaagttaatgagctagagacctccttttaaaataatctcatctattttacattttaatgctgtttctgttgtagatattacagtcctaaaaatgtgttattttcttagagtagactggaaagctcaaattaatcaatatgtctccagcctagctaccatccatttctgttttataggattatatacttgtttattttataaaatggaaagtttgaaatcttataatattttcatttatggttttatgtgaatcaaacagtcttggttcaggtgatttaaaaatatcactacaaaaaggagatatcttgcttatttttcattcatgtagtcctgtgtgaaattattggtggtctttctgtctccgtgaacatctgcagccacacagagaaattttatttgccttttgttatcagattcacatattatgaatgttgaggctagatatcattgatatcattgattagaaccattaaaatactaaagatactagtaaagaaaaagatactaatgacaaaaaaatactaatcttgcatattaatcttgtttttacttcagtgttagtaaaaacactagtaaaaagcagttagttacttcctttttattttgtatttgacattacacacacatgttctgcacgttctgagaagaaagtgtcagattgcttcctgtttgagtttagatgcaatcgctagtcttgctgaaagccaatgaaattgaaaggcttagctttgtaagtagaatttctgtttctttaactctatagttgataatattgtttctcaagtttcctttggtaggtattctcagggaacgttccaggatcttgtaatacttcttgtttgattagaaaatgattcattacgtgcctttcagctctttaggaaagtggacggccttcacatcagtgggattgaattcagaaaaagaacatactactaaaagtacttttgtaattattttattagtttttctcatattattagtttttctcatatttcagtgaaatttcttatattattagtttttctcatattcagtgaagtgctaaaaatgatgtccaaatttatgtttaaagtttcacagagttatacactgactttaaaattgcattgctttattttaaggattagagaaatggtagtgcacgggttaagaatttgggtgatggcaccaggctgtgtaagtccaagagccactttgcttgccatgtgactttgagaaagctgttccatctctttgtccccagttttctcatttataaaatgaggataatagtgcttattccatatgacagttataagtagtaaatgaatttaaatgaaaatatttaaggtacttaaaagtgctcatataagtagtaggctgcttattgtattgtactaatattaatgaagtattaacagttgttaatactgtgttttaattcttgctctttcatttgatagtcatatgactgtccccaggttactttactttcagtctcatttttcatctttaaaaacaagattatattatgttgtatctaataaggccatcatgatgattctagactagatatgcaaattacctactatgcacagagtaagggcaccataattttatttttttgtttttattttttatttattttattatactttaagttctgggatacatgtgcagaatgtgcaggtttgttcaaaacataggtatacacgtgccacggtggtttgctgcacccatcaacccatcatctacattaggtatttctcctaatgctatccctctcctagccccccactccccaacagcccccggtgtgtgatgttcccctccctgtgtccatgtgttctcattgttcaactcccacttatgagtgagaacatgcagtgtttggttttctgttcgtgtgttagtttgctgagaatgatggtttccagcttcatccatgtccctgcaaaggacatgaactcatcctttttatggctgtatagtattccatggtgtatatgtgccacattttctttatccaatctatcattgatgggcatttgggttggttcctagtttttgctattgtgaaaagtgctgcaataaacatacatgtgcatctgtctttattgtagaatgatttataatcctttgggtgtataccgagtaatggggttgctgggtcaaatggtatttctggttctagatccttgaggaattgccacactgtcctccacaatggttgaactaatttacactcccatcaacagtgtaaaagcgttcctatttctcgacatcctctctggcatctgttgtttcctgactttttaatgatcgccattctaactggcatgagatggtatctcattgtggttttgatttgcatttctccaatgaccagtgatgatgagctttttttcatatgtttgttgaccacataaatgtcttcttttgagaagtgtccgttcatattcttcgcccactttttgatggggttatttttttcttgtatatttgtttaagttctttgtagattctggatattagccctttgttaaatggatagattgcaaaaattttctcccattctgtaggttgcctgttcactctgatgatagtttcttttgctgtgcagaagctctttagtttaattagatcccatttgtctattttggcttttgttgtcattgcttttggtgttttagtcatgaagtctttgcccattcctgtgtcctgaatggtattgcctaggttttattctagggtttttatgattttaggtcttacgtttaagtctttaatccatcttgagttaatttttctataaggtgtaaggaaggggtccagtttctgttaggggtccagtttcagttttttgcatatggctaactagttttcccgacaccatttattaaatagggaatcctttccccatttcttgtttttgtgagctttgtcaaagatcagatggttgtagatgtgtggcattatttctgaggcctctattctgttccgttggtctatatatctgttttggtaccagtaccatgctgttttggttaccgtagccttgtagtattgtttgaagtcaggtagcctgatgcctccagctttgttcttctgcttaggtttgtcttggctatacgggctcttttttggttccagatgaaatttaaagtagttttttctaattgtgtgaagaaagtcaatggtagcttgatggagatagcattgaatctataaattactttggatagtatggccattttcatgatattgattcttcctatccatgagcatggaatgtttttgcatttgtttgtgtcctctcttatttccttgagcagcggtttgtagttctccttgaagaggtcctttacatcccttgtaagttggattcctaggtattttattctccttgtagcaattgtgaatgggagttcactcctgatttggctttctgtttgtctgttattggtgtataggaatgcttatgatttttgcacattgattttgtatcctgagactttgctgaagttgcttatcagattaagaagtttttgggttttctgaatatacaatcatgtcatctgcaaacagaggtaatttgacttcctctcttcctattcgaataccctttatttctttctcttggctgattgccctggccagaacttctaatactatgttactatgttgaataggagtggtgagagagggcatccttgtcttgtgtggtttttcaaagggaatgcttccagcttttttttttttttttttgagacagagtctcaccctgttgcccaggctggagtgcaatggtgcaatttcggcccactgcaaccttcacctcctgggttcaagcgattctcctgcctcagcctcccacgtggctgggatcacaggcatgtgccaccatgcctggctaattttttgtatccttagtagagatggggattcaccatgttggatgggctgtctagaactcctgaccgtgtgatccacccgcctcggcttcccaaagtgctgggattacaggtgtgagccgctgtgtttggcctcagcttttgcccattcagtttggtattggctatggatttgtcataagtagctcttattattttgagataggttccatcaatacctagtttattgagagtttttagcatgaaggggtgttgaattttatcgaaggccttttctgcatctattgagataatcatgtgttttttgtcattggttctgtttatgtgatggattacatctattgatttgcgtatgttgaaccagccttgcatcccagggatgaagccgacttgatcgtggtggataagctttttgatgtgctgctggttttggtttgccagtattttattgaggatttttgcatcaatgttcatcagggatattggtctgaaattttctttttttgttgtgtctctgccaggttttggtatcaggatgatgctggcctcataaaatgagttagggaggagtccttctttttctgttgtttggaatagtttcagaaggaatggtaccagctcctctttgtacctccagtagaattcggctgtgaatccatgtggtcctgggctttgttttggttggtaggctattaattactgcctcaatttcagaacttgttattgctgtgctcagggatttgacttctttctggtttagtcttgggagggtgtatgtgtccaggaatatatccatttcttctacagtttctagtttatttgcttagagatatttatagtattctctgatgatagtttgtatttctgggggatcagtggtgatctcccctttatcattttttattgcgtctattcgattcttctctcttttcttctttattagtttggctggtggtctatttcattaatctttaaaaaaaaaaaaagaaacccagctcctggattcattgattttttgaaaggttatttgtctctctatctccttcacttctgctctgatcttagttatttcttgtcttctgctagcttttgaatttgtttgctcttgcttctctagttcttttaattgtgatgttagggtgtcaattttagatctttcccactttctgctgtgggcatttagtgctataaatttccctccaaacactgctttatctgtgtcttagagattctggtacgttgtgtctttgttctcattggtttcaaagaacttattcatttctgccttaattttgttatttacccagagtcattcaggagcaggttgttcagtttccacgtagttgtgtggttttgagtgagtttcttaatcctgagttctaatttgattgcactgtggtctgagagactgtttgttatgatttctgttcttttgcatttgctgaggagtgttttacttccaattatgtggtcagttttagagtaagtgtgatgtggtgctgagaagaatgtatattctgttgatttggggtggagagttctgtagatgtctattaggtctgcttgttccagagctgagttcaagtcctgaatatccttgttaattttctgtcttgttgatctgtctaatgttgacagtggggtgttaaagtctcccactattattgtgtgagagtgtaaatctctttataggtctctaagaacttgttctgtgaatcggggcgctcctgtattgggtgtgtatacatctaggttagttagctcttcttgttgcgttgatccctttaccattatgtaatgcccttttctctgtgtcttttgatctttgttggtttaaagtctggttcatcagagactaggattgcaacctctgctttttttttgcttcctatttgcttggtaaatattcctccatccctttattttgagcctatgtgtgtctttgcatgtgagatgggtctcctgaatacagcatgccgacgggtcttgactctttatccaatttgccagtccgtgtcttttagttggggcatttagcccatttacatttatggttagcgttgttatatgtgaatttgatcctgtcattatgatgctagctggttattttgcccattagttgatgcaatttcttcatagcattgatggtctttacaatttggtatgtttttgcagtggctggtactggtttttccattccatatttagtgcttcattcaggaactctagtaaggcaggcctggaatctctcagcatttgcttgtttgtaaaggattttatttctccttcacttatgaagcttagtttggctggatatgaaattctgggttgaaaattcttttctttaagaatgttgaatattggccgccactctctgctgacttgtatggtttctgcaaagaaatccactgttagtctgatgggcttccctttgtgggtaacctgacctttctctctggctgcccttaacgtttttttcttgatttcaacctttgtgaatctgacgattatgtgtcttggggatgctcttctccaggagtatctttgtggtgttctctgtatttcctaaatttgaatgttggcatgtcttctaggttggggaagttctcctggatagtatcctgcagagtgttttccaacttggttccattctccccatcactttcaggtacaccaatcaaacgtaggtttggtcttttcacatagtcccatagttcttggaggccttgttcattccttttcattcttttttctctaataatgggttatttcattaagttgatctttagtctctttagtctctgatatcctttcttccgcttgatccgtttggctattgatacttgtgaatgcttcttgaaattctcatgctgtgtttttcagctccatcaggtcatttatgtttttctctaaactggttattctagttagcaattcctctcaccttttttcagggttctttgcttccttgcattgggttagaacatgctcctttagctcataggagtttgttattacccaccttctgaagcctacttctgtcagttcgtcacactcattctctgtccagttttgttcccttgctggcgaggagttgtgatcctttggagaagaggcattctggtttttggaattttcagcctttttgcgctggtttttcctcatcttcgtggattcatctacctttggtctttgatgttgttcaccttcggatggggtctctgagtggacgtcctttttgttgatgttgatgctattcctttctgtttgttaattttccttctaacagtcaggaccctctgctgcagggctggtggagtttgctggaggtccactccagaccctgtttacctgggtatgaccagcagaggctgccgaacagcaaagattgctgcctgttacttcctctggaaacttcgtctgccagatgccagccggagctctcctgtatgaggtgtctgtcaaccccttctgggaggtgtctccaagccaggaggcacgaggatcagggacccacttgaggaggcagtcctgtcccttagcagaatttgagcactgttctgggagatctgctgccctcttcagagccggcaggcaggaatgtttaagtctgctgaagctgtgcccacagctgccccttcccccaggtgctctgtcccagggagatgggagttttatctataagcctctgactggggctgttgactttctttcagagatgccctccccagcgaggaggaatctagagaggcagtctggctacagcggctttgccgagctgtggtgggctctgcccagttcaaacttcctggcagttttgtttacactgtgaggggaaaaccgcctactcaagcctcagtaatggtggacatccctccccacaccaagcttgagtgtcccaggtcaacttcagactgctgtgctggcagtgcgaatttcaagccagtagatcttagcttgctgggctctgtgggagtgggatctgctgagctagactacttggctccctggcttcagccccctttccaggagagtgaatggttctttctcgcttgcattctaggcgccactagggtatgtagaaaaactcctgcagctagctcagtgtctgaatggctgcccagttttgtggttgaaacccagggccctggtggtgtaggcacccgagggattgtgaagaccatgggaaaagtgtagtatctgggctgaagtgcactgttcctctaggcacagtccctcacggcttcccttggctaggggagggagttcctcgatgccttgtgcttcccaggtgaggcaacgccccgccctgcttcggcttgccccccatgggctgcccccactgtctaaccaggcccgttgagatgagcctggcacctcagttggaaacgcagaaatcacccgccttctgtgttgatctggctgggagctgcagaccagagctgttcctatttggccatcttgccagccacccctttatttttattttttatttatttttatttttattttttcagacggagtctcgctttgtcgcccaggctggagtgcagtggtgtgatctcaactcactgcaacctctgcctcctgagttcatgccattctcctgcctcagcctcccgagtagctgggactacaggcgcctgccaccacgccttgctaattttttgtatttttggtagagacggggtttcaccgtgttagccatattggtcttgatctcctgatctcacgatccgcccacctcagcctcccaaagtgctgggattacaggcatgagccaccattttttatttttttgaggcagagtctcactctttgaaccaggctggagtgcagtggcataatattggctcactgcaacctctgcctcacaggttcaagtgattctcatgcctcagcttcctgaatagctgggattacaggtgtgcaccaccatgcccggccagtttttgtattttcagtagagacagggtttcactatgttggccaggctggtctcaaactcctggcctcaagcaatccacctgcctcggcctcccaaagtgctgggattacaggcgtgagccatcacacacagccccataattttattaatagtagttgtagttcagtttttataattttctctcctgaaaaccctgccggatacccattttcctttttgtttaatctattgtaatatttaactgtatcctgctaaattgatatctagagagtttctaaaaggaggaactcttgggattcagggctttagacacgattgaaataaatgtctttcttaattgcagaccgtgagagaaacgtggtggtgatcattaagtttccactactgagtgttaaaaaaggatgtgagtgctgagccaacattttctctctcttttatctcctgttattccctcctctctgtccattaatatctgttgtgaggtggttatggcagctggagttatagtgcggacatgatagtgctgtaataggaactgcagtcctttcattttatagtgatggcatgggagccacggaaagctgtaaagcattggagggttacaagagttccagaagtactgtaagaaacctgaagttgcatttccttacattcttatatttgtgatggttatagttagaaaaatcactggaataatttggagtctagggaaagctttggtgtgggctagttttgtatgaatatttacttttgttaatattacataccaatttttgtttctaaatggaaaccttagcttactgagcttcacattgattttgaggactgtgtagtggtgattgaaaaataggttacagccattttggaagagagaatacactggacttttacatgaagtatggcatacgatacatatctgacacatcttgctaaaaagcaagtccttaatgacatgacctcccatcttgagcatagacacatgttttaaattcataaatgatggcctattgagagatatctattgtgttcattaaaatatacatatgaaacgaggatcaaattaaacatttcaagtagctaattttatcagctcttaataattaattagtttttagcatttagaatgaaggtaattaaaatagatttactacatgctataagatttctgcctctggaagatgaaaggggacatttatttttcatatgcttaaacattggcgtttttgcttttgttctatggggattttgtatgtaacaaaaaaacttactgagttattttattatgaaattttaattataaaatatctttaatgctttttagtcggcctaaatttaattgtagtttgttggaatgttacaattttattttaaatttctaaagttaatataaaagtcttttctgctactgtggtgtattgttatatcattttatttatatttttataatttgatttttaaagtgggtcatatctttacatagttcaaaatacccaaaatataaaggcaaaagtttttttcctgtctggattccttatttgcttggttctcctataatctccaggtaaaaacattagtttcttgcatatccttccagagtttatacaaatgcaagtagatatacgtacatattataagttttttcttttatcacattttaaaaagtataaatccagagatattaagtaatagataataagtgttagatgtcagataataacttgtaaagaataaagttgcattattgttatacttggaaataaaataatttaattacatgtctctctccagttatttcaggttgagtgtacgtttgcttcgtcttcaaagtagaaagttcctggagaagacctactctttctggaactgtttttgtttgacccatgctatgcaaacttactcattcatgcaaacactgggtgctttatgcaaatattaccacctgtattttttatttgtgtttctcaaaggagttttggcaaaatttgcataatgacttggctcatttagctttgtgtattgttaagagttcaaattctgtggatatgaaagtttacagtgtataccaaataaaaaggtcgtgtggtaggcagtgttctcaggataagcctgtgttaggtattcaaatctaatttgcatattggatctagacctatgactattaactccatttacagttgataaaaatttgcataaaattggtcatcttgatagcttaaggtatactgagcaaaatgttaactccttgggtagcatgtgtgactgtatgattgtcaagatgaaagttaatctaagcacatttggtttactgataatcatttctagaaatgagctgtagtatcatgtcagaatgtcagaaacatgtctgacaatttaccttttcatactagaaatggtggatgacatgtttcaaatcctggcagctgtgctgtatcaaatcctccctatgtgaatatcatgcttggtacttagatagtttaggagcagtactgtggcttgtgatttgttgtataattctgaaagaaaatatattaattttgtgcactttatattggctcttgctttattgtagcctttatccattaatctgctactgatggataatttctcaatcatttggtcctttttgtaatggctatgtggagttggcaattctttttattaaatattgcatgactgtatatgtgttaataatttattggggtagtgagctgatataaatctctttttagatgaagtttttggctatttacaaaggttgattactttttagaacagtgattgcctcagatttgcaaaggttgaggaaaagcacacctcttattttacctttttccatttgtggttaaacctattgtaaatatattggaagggttttaggcccttgaagacgcctctgtatttgaacagtttgattctgtcaatttcatttaaatcattattttttgtaagacctcaggataaataccacttttgaggtagtgactgaacaaacatgagttcttgaatagtttctattaaaatgttttttttaatcctatgagtggtctctgtgccttttaaaataagattttaaataagatgataattaatactcaagatatgatacttttatttatagtgatttggttgccttgatcatatttaatgatgatttaaaaaacctggatggagagagagatatatatgtatacatatatatatatatatacacacacacacatgaatgataaattattctgtaatattatttatacattcattgtttctagctagcaagcacccttagtgtatttaatgtattagatttatataattcactctatgtacaatattagattaggatgagaattatatgaaatgaggcatgccactatcaagtctggcatgtttttgttaccaagttctgagtgctgaatgagaaacagtcatgtatttactcagattgatcccggatcccctgagggaattggcagtttcctctggatggcattgctaaatcttcagttttctttcttcctcgctctctctgtggcccatacttaggtcagattactgagaaaatcagtgttattgacgaatgccttgtacatgattataaaagtctcaatacctctgagaaagatcagaaacacataattaaatgcaaatagggtaacttatttaattttgagttaattatagcttcatccaatgtcattgattactggggcagcacaacttggtgtccatctagtacagatgatagtgattcttattttttcttttagatatattaatgcttgactttgaggataacacatttttaattcagaactagtgtttaagttttttgttgttaagttttaacaaaagtttttcttgtgggcatgggaatggtaagtagtgattaaagttttgaatttaatggatataaggaagaaaaataaactgagaattgacttacattttttcttggagaggaggggattcagcactctcagagcctctcctctgttagcgtgctggtagttgatgaggatgaagttgatgagatgagcaagaatctggaaggaccaagcataggtatactaattacacagaactttaaaaatccgtgtatgattatttcattgcattgtagaattgcagatgagaaaagaatttgcaatatttaactcaaatttgttttatagctaaaataaccgaggcccgcagagattgggagatgtgtgtgaagccattgaatgagttactggcagcctagaatccagatcatatttattcaacctaatgccttcttctgcattattctctttccatgtttatttgttatacatacagtagttgttattggcttgctagatggttatgtatgattgagaaaggaggtaggaagacctaatgaaaagtttatttcacgattctgctgaagacttggtctgctgacagttaataatagtagctaatataacattgagaacttgctgtgtaagggacactgtgcaaagagcttcatgggtacttacatgtaatctccacagagttctctgaggtagatagcagtattataatactattttgtagatgcaaaaaccaagtcttaaataggtgaagtaatttgctaaagatacttatctactcagtatgggggcacatatttgaactcctaccatatcccattctgcttccctttatttatcagtcagcatataagggaaggtctttgaacagatccaaagcccttgtcagctctcatgtccagtgactactggaatttaagttttttccctctttttctaagaaaatttttcttttcattataatatgaaaatcagctaattgaatctcaccccagatttcaagggattggactccttcatgtcaagtttattctggatagtctctcagcccttagggaggaatggggttagcttgctattattgcttgctattatttggtcctcaggattttaggcttttacgtcgtggttagtggtttatcaaccatcctgaaaatggcataattatagtcttttgaggattgatggtagatgaacaggttacctgatttacctttccttgggaagttggaacacttgcctacctcttgcctttccatattttcttctttctccatgattcctcagaggttacttacttactgattcagcagcctcacttggttgttctttgattccctgggatatcagttttctgggctgggtttggagcagtgaggcattctttattcttcttacccactgtggcctctaattccttttaaccatattcattgtatgcttttctcatctgaagaagatggtcacatccagtttctcagtgtgaggatgaaaaactcactggtaatttttgttttgggtctccttattgattaggactctagtcctgtcatactgattaaatctcagaagggtatagatgtagggagtggaatctgcttgttcccactgagttcggaaacaaggaggatactgtgagcaaaggtttattcagtgatttttcttcctcttctactttttctttttctgtgtattatttggttctggcaagtaccaataaaagaatcaccgtgcagacctctaggattttagagcaaatttgtgccctctctgctgataatgattcttcttttgagaaacagttcctggcttttgactttgctagagactgaacacctactcatgagatctcaggtgaccatgtggctgagtttcccatcatgaattggctgttgtctgacctgtttagccataggttgggaacaagcagcagctatctgttattaagtgaaaatggtatataagagaccaaggttgggcaggtccagataatataagtaagttaaacgagctggtggctcagactcctttgataccaacttctgttccattgcttccactccttcactccatgtgtatggtctcctgggatgttccttatggaccatttgagtgaagaagaaaatttgagcctagtttataagtgggtctggatgatatgcaagtgttactcagaagcagacacggaaacactaaagccccacaaaagactcaccatgaaggacaatggtgaaggaagatcttcccagtggacagaacttctgtgcattatattttgttgcctactatgtctgcagtaggagatggccagggacaaagatctacattgattaatgggcagttgctaaattttttttttttttttttttttttttgagacggagtctagcttagtcacccaggctggagtgcagtggtgtgataccggctcactgcaacctccacctcccgggttcaagcgattctccagcctcagcctcccagatagctgggattacaggcgcttgccaccacgcccggctaatttttgtatagttgctaatgttttatcttggtggtcagagacctggaacaaacaggatgtgaagactggtgacaaggaagtctagggaagaggtgtgtggatagacctctctgaatgtccacaaactgtgaaaattgagtgccatgtgaatgcctgttaaagggcatctactgcaaaggatacttgctagtgagctggacagaacaacgtgctgtgtgcatgtcagtcagccttttattcacccacattagggcttgctcagtggacccatgaaaaggtggctatattggcagggttgggagctcttcatgggttcaacaataaggtctttccctttacaagactgattggctactgttattgctgagtgcctaatcagccaactgcagagtccaacattgagtccctgatatggcaccattcactgaggaaccagccagccatctgctagtggttgattatattggacctcttccatcatggagggggcaaagatatattctcacagggctagtagcatattctgcatatggatttgctttctctacctataatgcttctgccagcaccaccatctgtagactcacataaaactttattcactgttagggcattctgcattgtattgcttctgatcaagaattccttctctagcaaagaaggtgcggctatgggctcgtgctcttggaattaactggtcttgccccataccccgtgatctgaaagtggctagcctaattgaaaggtagaatggcttactgaatactcctaatgctaattgaaaggcagtaccatgaaaggatggggttctgttttacaagatgtagtatacaatttgaatctgtgaccaatacatgtgctgtctctttgactctgggattcaaggggtaagtgagagtagctttgctcattgttacacctagtaactcacttgcagatcttttatttcctttcttggaaatactgagctttgctgagctctggtttggagaccttggacttcaaggggatagtgtttccactagaggatacaacagtggttctatgagattggaagatggggctgcttcttggccattttgcagtccttacactactgagcaaatactcagaaagaggagctaatttagtcactggagtaattgatactgataaccaaggggaaattggggatttgatacactgcagtcaaagagacaatatctgaaattcaggggattctctgggcacctcttagtacttccatccccaacagtgaaggttaatagaaaataataccagccaaaaaagggcaggatgattaatggctcaaatatttcaagaaggaaggtttgggtcactccaccaggtaaagaactcagagcagctgaggttgtttcatctctggagctttgatctgggtcttctttttaatatcctcgagttctatgcttaatttttgggtacactaataatggttataataactttttaatgatttatctattctaacatctgtgccaattctgggtcagttcttattctccaatttttcttctcattatgggattcctttttcttattttttacatgcctggtactttttgataagatgctaaacattgtaaattttacctttttggttgctggatatttttgtgttcttataaatatttttgagctttgttctggatgcagttaaattacttggaaacaggttggttctgttcagcatgactggagccatgctcagtcaagggctaattattccctgctactgaggcaagatccttctgtgtgctttactcagtgccccatcagtcgtgaaattttcatgactggctggtaagaacaggcattatccccagtactgagtcagctctgggcgccgttactccattcttttgaggtcattctttccccagctttggttggtttcctcacatacatgcactggtcaatgctcagctgagtactgtaattactcctctcaagtactctgtcttacaaactctagcaagccttgatttcctcaaattcttaactctgtcttagtgcagagtcttctggactgactgccttgcacaactgcagccaagtctggaaactgacaaagcagtaagctggggcaattgtagggcccacttcatttgttttccgtctctcaggggtcactgttctgcattgtgttatgttcaatgtcttgaaaaattattgttttatatgttcggcctgttttttggtcgtttcatgtggaagcttttaatgttaatgttatttctgagaccatatatttatataacattgaattggataagattaaacagaagaaacattatttagaaagttaaaaaaatttttctgcgtgagagcctgttgttagttatttagaatcacttcttaatcacagcaagatactttgttttattgaagatttgtttccctctagattttctccttattaaatagtagaacatagagaagagaacagttaaggtcggccggattgcttctgcaggtttgtgtccatagagaagctgaatgtgtagaatttcaagaaggtaattgagaagtccgggagtagagtttatctcaacaccaaaagaatcatttttaaataaatacagggtgagaaaagtgaagaatcaaaagagtagcttttgaagcacagtattcctaaggtcttgttttaaggatatgtttctgtgtttgttttttattgatttgagatcatcttaatgcgtgttagaaaatttatcaggctgaacgagttgatcctaaaatgctgcagaaaagttggatgtgaaatgggaaagaaaactaactttcatgagatgcttcgtaaaatctatttcaattcagggtgaaaattgcaaaactgtctgccaatgcgtttttgatggacattctggctatttgtgtgagtcttctgcattgaggttttatttattgagcttccttttgcttcactctagaccaggtggtttacatatgttatctcatcttgtccttctgacaaatcctgtgaggtatgtggtgttaatctcattttaaagatgaagattttcaggcttatagggtttaggtagttgacttaaggtcactggtagtaagcagggattatggctgggtctttgactgctaggcaagtattaacacctcatcacacacatgggctgctttttctgaaggtagtaggtggagatttctttccttgagtaaaagggcaaaaaagaaagaacgtaaagtagtttttagaagtagtttcttctggtcaccaaattaacaggaaaagggaaacttgtctaacctaggtgttgtgttttccccattattctgactacagtaatttctgttgaaataaccacagtcattttgttgaaaagccatacgtgtttctaaataaaatagttacataattttaagtgcatattttaattaattacacattcttttaaattattcatagactatcatagatttttatatcagttggcatctggagtcacaatgtaaatattagaaaaaagattcagaggacctttttcccaaataaaatcatgtgaccctaaagaacaatttaaataacactataaaaacagagttatcaggagagggagtggtggctaccgatatttaccattttttcttggtggggatttataggaatagaatacagtcagttcctctatttatttatttttgtttgtttgtttaaacccgttgctgttgtgtcattaagaatgtaaaataatgagatagcttttttcttttttcttttttttttcttttgaacaagtctcactcttttgcctaggctggagtgcagtggtgcgatctcagctcactgcaacctccgcctcccaggttcaagcaattctcctgcctcagcctcctgagtagctgggactagaggcatgtgccaccacacctgactaatttttgtatttttagtagagatggggtttcaccatgttggccaggttggtcttgaactcctgacctcaagtgatccacctgccttggcctcccagagtgctgggattacagacatgagccactgcacccagcccaaggtaactcttaataaatacagcaatagctcagggtacttacatctgagtgtgttctgctgttcctgaaataaattaacatatgcatagtaaactctaaagttatcaccatttgggtacatagaagtttactgaggaaagaagtttagtgtctgtcatataaacagcattattatccttggtaatgtctgaagtatacagccaaagttgagaaagtttttgaactaataaaaatatattttcattgattatgagagtgaaattggtacatgtgtaatttatatatatataaagtacacaagttatctatatatagtttgtatacttaaggaaattgaaaatttaagaaattgaaaatctactactttttagtactttttaggtttctttccagttctaagtgagtgtgactttgtataactgcattgtagtatgttctcctctatgcaaaaataaacaagtaaataaaacccagtgttatatccttgacgaggacactattttgttgctgacatatggttagtcatgagttgtattcagtaccataccttcctcatttagcagcaccatctgttaaaactatggctgataccagtagagaggaagccaattatttttgagtttgtgagcatgggataaatgcgaatatgtctgaagttgcccgcagtcaaatcctttacaactggtgtagtcaaacaattggaggtagtgctaccttggggaaccaggtcaggaaagaacatgataatgcttgttcggcatctttctctactcttagcaagggtgatgtgttataaaattaaataacacataattaagttattaaaaagatttgcatgatatgctttgtttttaaggctctcaaactattggtgtttgtggtttgtgactgcagctggcataataagagttggtaaaggtcttttcacaatgaggcaaaacctttacaggaatgattttcttcataggctttttatggatttgggagagtattgtactaataaagttaagcatgaagttattagacatttatcattgatttcatgtctgtgtctttatctgtgttacgaatgctttggactgcacatatgggaatatagcagaataactggccttggagggacattgggtttttcaaaacagacctcttatctgtgtgtgtgctggcagcaagtatgtatttttcgatttccacctggactcttggagcacctttttattttcttcttctttcttccttcttccttccttcttcttcctccttccttcctcctccttctcctccttctccttcttctccttctcctcctcctcctcccccctcctctctccctcctccctctcttttccctccttctcctcccttcttctccttctccttcttcttcttcttcttcttcttcttcttttttttttttgagatggaatctcactctgtcacccaggctagaatgcagtggcacagtctcgactcactgcagcctccgtctcccaggttcaagtgattctcctgcctcagcctcccgagtagctaggattacaggtgtgcaccaccacgcccagctaatttttgtatttttagtagagatggggtttcaccatgttgttcaggctggtctcaaattcctgacttcaagtgatctgcccaccttggcctcccaaagtttattattattattcatcttaatgttctccttaatattgggaccatattctgctaaatgaagcatggtatatatgatttttcctttttctagaggtttatctttggaaaattttattttcttttaacttttatttttacttcaggggtacaagtgcaggtttgttacataggtaaacttgtgtcatgagggttcgttgtacagattacttcatcacaggtattaagcccagtatccgttagttatttttcctgatcgtctccctcctcctgccctccatcctctaataagccccagtgtgcgttgttcccctctatgtgtccatgtgttctcatcatttagctcccacttataagagaacatgcagtatttggttttctgttcctgtgtcaagtttgctaaggataatggcctccatctccatccatgtccctgcaaaggacatgatctcattcttttttagggctgtgtagtattccatggtgtgtatataccacattttctttattcagtctcccattgatggacatttaggttgattccgtgtctttgctattgtgaatagtgctacaaagaatatacacttgcatgtgtctttataataaaacagtttatatttccatggatatctgcccagtaatgggattgctgggttgaatggtatttctgtctttaggtctttgaggaatcgccatacagtattccatagtggctgaactaatttacattcccaccaacattgtataagcttttcctttttctccccaaccttgccagcatctgttattttttgactttaataatagctgttctgactggtgtggaaaacgtttttttttctttttttttgaagtagtgacaactttgaaattatatttggctctgtttttgcccagtcttccctctcctcttccctcatgcacaaacttaccataggaccaataacccatatcaggccagactttcccttccctcactttccctccttttctcttattttcctttctgtaagtaaatcttatccaaaacaggaaacaaacattaataaaatataaaaggcagggagacaatggcaacaaaattctactttaggctagaatctaattcttgagtaattctttcagaaaagatctgggtggtaaattctctgtgctcttgcacaactgaacatgtttcatacttgttggaatgagtctagtttttgaaactttaaaatattttttagagacaggatcttgaacttgggctcatgtgatcctcctgtcttagcctcctgaatagcttggactacaggtgcacaccaccacgcctgactagaatgggtctaaatgtttagattcaaagtcattttccctcacagctttgaggcattccttcctttagaatttattctaatagttaagaaatctggtggccatctgttttctttctctgcaggcatcttttgtttttcatttttcaaaaacttttaggcctttatttttagccttagtcatctaaatatcagaaggacattcctggtgtgaatgtctattcagctacttcatgcttagggctctagggattctgtcaatctgaggtttcgtgtcttagccctggaaaggttttaagtttgtccttaatttccataccttcattttctttatgttctccatttctggcaatcctgttatatgtgtcagcttttgtggactggtcctttgtgcagtgatccacctgcctcagcctcacaaagtgctgggattacagatgattttaaagtgatggtgttatttttcaggaggctaactctattattggtatatgatagatggggaagattttacctgtgacccagaatgaacatgtttgttatgtatttcagtttaaaattaataatgtgtgtgaccaagacactggtgtttactattactgttatgctcttggataaagctaagaatattaaaacttgaaaaaattaatacataatatgttacatatttgtgggtacgtgtaatattttgttatgtgcatacaatgtgtaatgattgagtcaatatttggggtgttcattgccatgaatatttatcatttctgtgtactgggaacatgtcaggtcctctcttctagttgtatatttgaaatatacaatatattgttgctgtctgtagtcaccctactcggctatcaaacattagaacctattctttctatctaactgtatgtttgtacctattaaccagtctctcgttatccctcctagtccttggcacatccccttcccacttgcgatatctattattctattctctacctccatgaggtcaacatttttagcccccacatgagtgacaacatgcaaaatttgtctttctttgcctggtttatttcacttaatgtaatgatttccagttccattcatgttgctgcaaatgatatgattttgttctttctttatggccaaatagcattccattgtatatatgtaccacattttctttatccatttttctgtgacagacacttaggttgatttcatagctttgctattgtgagtagtgctgcagtgaacatggaagtgcaggtatccttttgataaactgatttttttttcctttggataaatacccgttagtgggattgctggatcatatggtagttctatttgtagttttttgagaaatctcaatactgttttccataatggttgtactaatttacattaccaccaacagtgaacaagagttcccttttctctgcatccttataagcacctgttattttttgtctttttaatagtagccattctaactggggtgagatgatatctcattgtggttttgctttacatttccctgatgattagtgatgttgagcatttttccatatacctgttgtccatttgtatgtttcgttttgagaaatgtctattcacatactttgcctgtttcttaattagattttttttttgctgttgagttccttatatattccgcttattaattctttgtcagaggaatagcttgctaatattttcttcctttttgtaggttgtctcctcactttgttcctggttttcttgctgtgcagaagctttttagcttgatgtaaaaccatttgtctacttttggttttgttgtctgtgcttttgaggtcttaatgataaaatctttgcctagaccaatgtcctggagtgttttccctatgtaaaatcacttttttgaatggataatttgttgaatggcacaaaattcaaagggaaccaaaacccatacagtaagtaataagactccatccatctgccgtctgcttcagctaagtatttgtgaagaaactcattgttgcaatttctacacacacacacacacacacacacacacacacacacacacacacacacacacacaaagggtatggatttataagaataaatgtacacacacacacatatatatatacatacataatgttttttgctttctccttttacataaaagttagcatataatacacatgattttcatttaactatttaggttgttgcagaagtaattgcagctaatatatgatttggttaccttgttttatcagttcatcacaaaatttctttctttttttttttttttttttttttttttttttttttttttttttgagacggagtctcgctctgtcacccaggctagagtgcagtggcgtgatctcagctcactgcaacctccgccttccaggttcaagtgattctcgtgtcttggcctcccaagtagctgggattacaagcatgtgccaccatacccggctgatttttgtatttttagtagagacagggtttcaccatgttggccaggctcgtatcaaattcctagtctcaagtgacctgccctcctcggccttccgaagtgctgagattacatgtgtgagccaccatgcctggctgcgacaaagtttcttattttattttttgaagtagtagtatattccattttgaggatatgggatatttatatacagtaaatatttatatatttatatataatatatattatttagccattccttttattctagacatttttgttgtttcttttcttggcttttgctaataacaaaactgctacagtgatacccatgtctttgtatttatgtatcattttgcatatgcataaatatatttttagactatctggaagtgtaattactgggttaaaagttgtgtacatttctaattttgatagatattacctaattgccttgtgtagagattatattaatttatgctcccatcaacaacatatatgcttgctggtttccccagaaccttgccaacatagttctatgtatcatgagttttttttgatctttgcccatctgatgaatgaaaaatgggatctcagtgtcttttagtttgcatttcttacaagggtgattttttgtttcattttctgtgacctgtctgtatccctttatcatttttctgttgggtgacgcttactgatttgtaggtactctctatttgggaaatcaacccttcatgatatgatttccagatttttccccctttgctatatttttatgttgtttatggttgctcttgccatgaagaaaataattactttttacatagttcactttatcagtgttttcttttactccaaggtgatgatggtaattctctgattgtttctgctgttactttaatggtttcattttcttacatttaaatctttgagttacatgaaatttattttgatttatgcatcattgatggttccagctctccttcccctggatgactagccatttctcctgataccatttattaatttatcttttctcctttaattcgaatgcatctaccaaaagctaacttactaaatgtatttgtattccttctctcatatttaagagttatgtttgttcagtatgaaaaagttcaaacgtacccacaagtagagggaatagctcagcaagacccccctacttatcacagattcagtaattaagatttatctttttttccttttacttatgtttttgctgaagaattttaaagcaatcccagataacatgtcatttgcctcttagtagttctgcgtgtagctttaaaaatatggactttcaaaagataatcaaatatttgactttttttgtttattatactttaagttttagggtacatgtgcacattgtgcaggttagttacatatgtatacatgtgccatgctgatgcgctgcacccactaactcgtcatctagcattaggtatatctcccagtgctatccctcccccctccccccaccccaccacagtccccagagtgtgatattccccttcctgtgtccatgtgatctcattgttcaattcccacctatgagtgagaatatgcggtgtttggttttttgttcttgcgatagtttactgagaatgataatttccaatttcatccatgtccctacaaaggacatgaactcatcattttttatggctgcatagtattccatggtgtatatgtgccacattttcttaatccagtctatcattgttggacatttgggttggttccaagtctttgctattgtgaataatgccgcaataaacatacgtgtgcatgtgtctttatagcagcatgatttatagtcctttgggtatatacccagtaatgggatggctgggtcaaatggtatttctagttctagatccctgaggaatcgccacactgacttccacaatggttgaactagtttacagtcccaccaacagtgtaaaagtgttcctatttctccacatcctctccagcacctgttgtttcctgactttttaatgatcgccattctaactggtgtgagatggtatctcattgtggttttgatttgcatttctctgatggccagtgatgatgagcattttttcatgtgttttttggctgcataaatgtcttcttttgagaagtgtctgttcatgtccttcgcccactttttgatggggttgtttgtttttttcttgtaaatttgtttgagttcattgtagattctggatattagccctttgtcagatgagtaggttgctaaaattttctcccattttgtaggttgcctgttcactctgatggtagtttcttttgctgtgcagaagctctttagtttaatgagatcccatttgtcaattttggcttttgttgccattgcttttggtgttttggacatgaagtccttgcccatgcctatgtcctgaatggtaatgcctaggttttcttctagggtttttatggttttaggtctaacgtttaagtctttaatccatcttgaattgatttttgtataaggtgtaaagaagggatccagtttcagctttctacatatggctagccagttttcccagcaccatttattaaatagggaatcctttccccattgcttgtttttctcaggtttgtcaaagatcagatagttgtagatatgcggcgttatttctgagggctctgttctgttccattgatctatatctctgttttggtactagtaccatgctgttttggttactgtagccttgtagtatagtttgaagtcaggtagtgtgatgcctccagctttgttcatttggcctaggattgccttggcgatgcgggctcttttttggttccatatgaactttaaagtagttttttccaattctgtgaagaaagtcactggtagcttgatggggatggcattgaatctgtaaattaccttgggcagtatggccattttcacgatattgattcttcctacccatgagcatggaatgttcttccatttgtttgtatcctcttttatttccttgagcagtggtttgtagttctccttgaagaggtccttcacatcccttgtaagttggattcctaggtattttattctctttgaagcaattgtgaatgggagttcactcatgatttggctctctgtttgtctgttattggtgtataagaatgcttgtgatttttgtacattgattttgtatcctgagactttgctgaagttgcttatcagcttaaggagattttgggctgagacaatggggttttctagatatatttgactttttatggccaggagcagtggctcatgcctgtaatcccagcactttgggaggctgaggtgggcagatcatttagcccaggagttcgagaccagcctggacagcatggcgaaaccccgactctaccacacacacacacacacacacacacacacacacacacacacactacaaaaattagctggacatgatggtgtgcacctgtagttttagttactttagaggcttaggctggagaatcacctgagtgcacgaagttgaggctgcagtgagctgtgattgcaccactgcactccaggctgggtgagtgaaacctttctgtctcagaagaaaaaaaaaaaagcctttttgttctaaattaaagagaaaaaccacggggggcttaatagttgatgtctgtgcttttactggtactcagttgctgaaggtggtatcatattagtcctttaattgcttagagttgtgtcctcatgaaactttctccctgaacttgcttttaagggagatctgcctctgtatgccatggtattggaatgttttattagtgtagaagtgtctagatgattttcctagggggccacttaatgagcagtctgtgtgtaggccctatgaataataaaattgtgatcagtggttaagtatagccaaatgtatggataggacctagggaataataaagaagtgcttcaaatgtagcttaaaactatttttttttaaattttactttaagttctagggtacatgtgcacaacgtgcaggtttgttacatagatatacatgtgccatgttggtgtgctgcacctgttaactggtcatttacattagatatttctcctaatgttatccctccccctgtcctccaccccatgacaggccctggtgtgtgatgttccccaccctatgtctgagtgttcttattgttcaattcccacctgtgagtgagaacatgcggtgtttggttttctgtctttgtggtagtttgcttagaatgatggtttccagattcatctatgtccctgcaaaggacatgagctcatcattttttatggctgcatagtattccgtggtgtatatgtgccacattttcttaatctggtctatcattgaaggacatttgggttggttccaagtctttgctattgtgaatagtgccgcaataaacatacatgtacatgtgtctttatagcagtatgatttataatcctctgagtatatactcagtaatgggatcgctgggtcaaacaatatctccagttctagatccttgaggaatcgccacactgtcttccacaatggttgaactagtttatactcccaccaacggtgtaaaagtgttctatttctccacatcctctctggcatctgttgtttcctgactttttaatgatcgccattctaactgctgtgagatggtatctccttgtggttttgatttgcatttctctgatggccagtgatgatgagcattttttcatgtgtctgttggctgcataaacgtcttcttttgagaagtgtccgttcatatcctttgcccaccttttgatggggttgtttttttcttgtaaatttgtttaaattctttgtatattctggatattagccctttgtcagatgggtagattgcaaaaattttctcccattctgtaggtttcctgttcactctgatggtagtttcttttgctctgcagaagctctttagtttaattagatcccatttgtcaattttggcttttgttgccattgcttttgctgttttagtcgtgaagtccttgcccatgcctatgtcctgaatgatattgcctaatctatttttgaaagtgtgcataaggcttaatgctagaaattggtaacattttgatcaaattcatgactgcattcttgagaataagcgtgtccaggcatattccctatttgattccagaattataccactaagatttgtgctcagttttcattttatcaattcttttcgttttttttttggatacagggtcttgctctgtcacccaggctggagtgtagtggcgcagtcttggctcactctagcctcgacttcccaggctcagctgatcctcctgcctcagcctcctgagtagctaggaccacaggcacgtgccaccacacctacctaatttttgtattttttgtggagatgaggttttgtcatgttgcctgggctggtcttgaactcctgagctcaagcagtccaccctccttggcctcccaaagtgctgggattacaggggtgagccattgcacctggtgattttttcagtttcatatgagaaaatatacttctatgatagtgacaggtacaaatattttacatagctataaatttcagtttagattatatttgtcaattggattccatggatattatctttcctttctgtttaaactatttaaagctaagctaccctcatatcacttgttattgataattcagatgtatcctcagatttgtactccaaaggcaacttcagaaacttaaaacatggttcagactcttgtgcatctataaaattcttttgaaaaatagaaagccagaggttgcaaggctttagttaggagtaaattcaggagaaccattgtacaacatggtgacaatagttaacaatatatcgtattcttgaaaaatgctaagagagtggatgtaaaagtgttcttatcacaaaaataactatgtgaggtaatgcatacatcaattaactagatttagtcattctgcaatgtatataggcttctaaacattatgttgtatgtgataaatacaattctatcttctagttaaaaaaaatgagaaattatttttgccaaatagccctaataatcaccagatagtcaccaaataccttgcagcaatataaaataaatgcagattttggttatcatttgtatcattcatatatccaatttgactggcaattcttccttttctgaacaaatttcaaccccttaattttctccagtttcatggtgtgtctatgccttgctacaacctgctgaatctcatacatatttgactggttaggtcttccagagccctgcagttccaaaaaagatttaatgaggcacttgtttgtgaattcactagccagtcatttgattaaattaaaatgaaatttctgtgtttcgcttttctatattttaaatatccccctattttctatatgtattcaagtgacttggaaaggttatagcaccatctcttaatgaaggatttttgtggaaagctaactcacacctctcttctttgacttgaataaactgttgtaatctacttttgtctgttttgttcaatataggtaaattatctgtgcaagcgaactcacgtttagagagaatttctcagttttcttcccgtagattctcagtcctattattagttcatatgtgttggttaagtggtaaaacaaggcttgggctgaaagccttattttccacatatacagagccatagcttatactggagaaaagaaaagtcaccttaatcttttggagggaaatgatgaaatctggaatagtcataaccaaacaatgtatatttaacaagatagctcaaagactttctatttttataaatttaacattcttttagaatgattgaatttagaattattgaaaatagcataaattcttaaagaatttaaatgtttgtgccatttgttaagcttctacaatatgctggatctgctcttgtgactttgcatatatcatctttaatcttcacaacgaatctgcaaaataaatattatccacataagatagatgagaaaggtgaagctccagaggttaagtatcttggctaatgccacacagctaatatatgatggagtgaggatttgaagctacatttctgaatataatgctctttcttacttctggacatttgatagtatttgttgaatgcttgaaagatgagaagactagcacacttgtttactgggtctatatttcctgcctgtctaacaccgaattttttttttttctggaagaaaacttttggcttcctaataggtgcatttttttctgttaataattttattttttcaacacttttaaagaaaaattgaataggtagtatggaatgctcctataggtgcctctctttccctgccatagcttctcctattatttacatcttatattagtacggtatgtttgttacaattaatgaaccaatattaatacattattattgaagtccatggtttgtttttatctaatgtcccttttcttttccaggatgccatccaggacaccatattacatttacttgtcatgtctccttagggtcctcttgctgtgacagtttctcagactttattttttttcccctaaagcctttccactctaccttactgctgcctcagatttaccatttgcatttaagtacaattgtaatttgttactgattaccttgagattttttggtggtggtttttcaaagagctttgctactacataccttgacatttttaaggaatccaggtgtccaggttattatgtattctaggatgttcctctgttagaatatatgtagtgtttttctcatgattagcctgggatatgggttattgggaggaagaccatgcaagtgtgctgccattttcaccacatcatatcctgggtatgtattgtcaacacgatttatgactgttggtgttaacctgaaacctggtagaagtagtgcttgtcagttttctccactgtgaagtttactcttttcttccctcccttccatactggaagtcattacatgagcttgcactgaaggagtcggggggttgtgctcccccttttttagagtggtgtatctacataatttatttggaattcttctacacaggagatttgtgtcttctcctgcatttattaatttattcaatcatttatatcactgtggagacatagatatttattttatactttgagttataattcaatactactttatttattttgttacttaaattgatctagctttggccattgggagatgaccctgtcagtcacttccgtgtcagtcgctcctgtgtccctttgcatacctcagtgtttttttttttgaccactttttggcactgcaagatgctctgggctcatcttgcatatttcctgccccagtcttaaaatcagccatttctccaagaagccttgattccttttattgaagagtagtgttagaaaccaacatctggtgctgggtgtgcttattactgaggtgtcatttcttttaaactctcccagtgtcagggaaaaatgtgtatatactaatctttagatataatacatatataaaaatatttctatatgtgtctctatgaagttaaacatgagttcttactgatgtttccagctctaatttattacaactcctaatatttaagtgattttaagaacactttttaagtttatggcagctttattctttacctttttcttttgtttagctttgcttctatatttaggtggactctattcactctcagttgtgtcgtataaggacttctcaattcttgaattgttttaattcttccttgggctgcctaattttttatacacaagtttcccctaccccaaggaaaaaattcttcatggttactatattttctaatttcttacttgtatgtttgaaaattgtattaaaaaaactaaggattggatcctatcagtgagatatttgagaattatatctgttcaccttttaattttcacagtattgctttctgattttggatggatatattagacaaaggggatggagagtagtgttggattgatactgaaatgtttttagttttgcctactctgcttctagatgacagtgttcaaaagcttatagtttcagtttgggtcccttcccaagttaagaacactgttgatgttgttctttgcttattttatttcttgtgtttagttcattgggttcagagagatacaggttcagtgattctgtattgttctgccatctttacacttgatcttagccaaaaggccgagaagtgatattctgctatcttttactttgaccaatattttctttcccctaaagcctttccactctactgcctcctcaagtttaccatttacatttaagtacagttgtaatatctagttgctatctttgctgttatctagtacaactctcattttatagatgaaggagcttaattgattatcatttgcattagaaactgacacactaattttttccccctaattgtctcaaacaaaagggaaactacttttctttgtcaggcttttttcaataaagtatttttatgtctaagcatatttgtggtgactaattatattgtttttgtatggattttttggggaagaaaaatgtacattaaaagtcttctgttagtaagataatgaaagataaatctttgtatttccaaggcaaagcaagcataacttctcttcaaacagattgttttggtcaaatttggttgttgcagaaagcccattcatttttttagtaacaacagataaagagcttaactaaagttgtgatgaaaatacatatacttatttgagaagactggtaatttttgaaaagtcttaagataatcagtataaaagccaactttttaagcaaagaaagtaaactattaagtttatgcaatgattcattttggatatttggaataggatatgacattattatataacatagtttgtcagcttagacttattttgtagcacttaagtgattcagtgttttaagggatttaaaatgtgatcctttacaatacactttcccaaaatcagtgaggaaaggaaattgctatgttatgttcaaatcttgttaaaatcttattgctatagtttacagaagaggtatagtgattttaaaaatatttatgcagtgcaaatgcttgctgtatatgttttacaaagtgaatcaaagttggagggtagttatttaataggggaatatttgttggttcctaagtcatggtttctgaaataaagaaaaatagcagtatgcagtagacctttattttattatcagtctattttgatgtgcttttaatagcactggtgattaaagttgcagagtctggagccagactgttaagttcaaatcagtgttccactatttgtaatgtttggccttggcttacttaagcccaggttcttcatctgtaaagtggggctaatcatgtacttgccttgtagaatccttataaagattgagtgaatttatgcatgtaaatctctttgatcctggcacagagaatatgctcaataaatgatagctatggttatatttttttaaaggagtatgggtttattatttatgtgttttctttgaaggactgataacctttgacatgaggcttattgtagagttcttttcttggtattagatcttgtgcagtttgggagagtttactatttaattcaagcagtttgttttcaaaatttatgagcagacatttggtggtttggagtgactacaaggatgaggaagtataaacagagataggtagtcagttcttggtagatacctttttctttttttaaaaacacttgagaaatactatttagaactgagacccatgtagacagccaccaccatactgttcatcattagccataccattccccatcattagttaaggaaatgcattcgatttttaagttttttcccccctttctgtgctgtctttttttctctcctgaggatgcttcttgtatctttgcttctgacttgagggcaggccaggcagataataagtgtatagctgctgcaccattttatatacatgtgaaggtcctgcttttgatgtaattgggtctctgcttctcttcaccttaatgttcttaacaacttgctaccaccatgagccccacaaactcatatgacttggtatgatctcactgattagatctgatggtagaattaatttaaaaccacccatttttacaattgacgagagtagtgggaaaaaaaaactgtggcatgaacattgagaagcatttcaaattccatgtagatggcatgctactcaattttttacataagcttctgtatttaattttgtataagaacaaatgcctgcggagtatatagaggccaaatttttgtttgtttgagtttactatattcacatcaacaactggaattagggtaggctgtagaatagaaatatcctcttggtaataatgcagcaaaattctgtctgtaaggcttttatgctttttggcacaggtcatatgattgtggtttaggaaatatactcacctcctctcttcatctgttttctgagtcctaatgtgatttcccagaatacctagcacatataattcaaaaagacaatatttgtctttgctctggttgcagtaagataaaactctgaagaattctgggttaagatgttacagaaagttaatttccaggaaaaattactctattggagaaggtatagctctttctaagagtattccatagatgagactggtatctgtttttgtaactctattcttacatattctattccacttcagcaaacttcttttgagtagatgataaaactcttaaattttttacctgggtgctcttatctatcaaatataaaaaagcctttagagaaaaatgtattggtgacttcaaatagtttagtcaatacgcatccattttgcatttttggtgttggttagttgaagaagaatttcaatggtgtgtgttagtcttgtgtggctctcatagttaccgcctgggcagtatgtggaattcactaaatgaattgaaaagttctgaatatctctttaacttatgacaaatccctgaaaatcagtgctttctgatgagtcaaactatataggtagtatataaaaagtcaacatatgctatacgggacagtttaataagcatttagagtatttggctcaaatgtgttctgtgtactttaatcctcttctgtgatttgtaatatttagatccattttccctattgggttaggtggaaataaggcattgacagtcaatgaattgcttttgggtagagctcaacataaaacagattttgctgtagtaaagattatagattatcatcttagaagaaaatgtagactgttatgtgaaaaaaaatggccagattttgtaagattgtaattgggaaactctgcacccctttgaccaattttaacttattactctttcttactagcttaggcttaaaacaataatgctgtctgcaagatctgcctttcttgtgatccccccatccccagccattaaattctaactaggatctatgttttcttctctggagttacttttggtgggtggtggagggtcccacggatgtgaataagttcactttcccctacttcttttattttgtaattattttacttctaagttcacttttgttacatttttttcttccttgactcactgagttagagttagtctcattgttcagaagccctcttcctttataacttctttttttccaatgcctctgttatatgcagaacttaccttcattgcctcataaatattggtgttaggagacatcatccctcatctgtctcattttgcaaataagcttcctgctagaaagttggctagatggaagcagagaccttcactaaaaccttgatcctcctctgttttcccagcacatagtaggtactcaaaaatacatgttgaatgagagaaaggaaatgagatccagagaggctaagtgaagtaatatatgagaatatataacatgtaatgtcatgaatatatgttatgaaagtactaaaaggctccagaaatgttagttatttgttgttagtattagtgtaatagtaaattaccattaataatattttaaaacttattactagatgatatagagatacttttcattgtatgtaacagaatacccaatcgatagtgacttaaactaatgaggattcatttttacattttgagggtagatatctgccaacattgacttagctgctctgtaatggcagggctattgttctgtaattttcttggcctttccttacttgttgcaagatggctgcttctgctgtaggcatcacctttctgtttgaagcaccaggaaagggcatggatcaacaacagcatctctgttttaccagggaaccaaaagccttcctggaagctgtgtagtacaacagtcttccccttaagtcttatggccagactgtttcacatggccacctctatctggaaggaaggctgtgaaagggagttggcttttctagcctctactgtagacggggaagggagaaggagtttggaaatacattctgggtttgctgcaaaatctacctcttcggctagcccaaatccgaatatatccttcttatgaatacattttatagagaattcagtcaccatctctcccggggagatgatacctgttcttatacataattgcatctacttcaaagtccagaatgtctgcttgatacatagttttctccatcaggtctagttgtagcttgttgtcctctggtgacctagaactaagaagacaaatatatacttccagcacatcaaaaactactagataaaggaatgagataactcaaataaatcttttcctttagaaaaggggagaattagaaactcaaaatagtcattggtccacaaatataccatactctgtaggataagaatattgaagatttcctgttgtggcagtgagtgaaattccttaaacaatctgctatacttatttatgatccctgggaggtttcccttggtcacatctgaccagaaagtattgattggtgtagctgtataataagtcaggtagaccagttccttccacattattcttttccgaattgttttggctattttaaggacttcccctttccatataaattttagaataagtttgtttatgcctactgagaaccttgctaggatttttgataggaattacgttaaagttatatatcaatttgagaagaattgatatctttactatgttgagtgttccaatccatgaatttgataagttcctctgataatttggagagactttaattttttcaacacaattttataatttttagcatgtagatcctgtgtatgttttgttagctatacacctaagtatttcattttctttggcacaaagaagtataattggaatggcatttgccttttaaaatttgtttcatttgctgttagtatacaaaggtcatgatttttgtttgtcaatcttaaattctgtgaccttgcagaagtcactttattctaggagttttttgttgttgttgttgtaaattccttgggattttctagatagacaatcatattatctgtgaaaagagacagttttatttgttcatttccaatctatatgcattttatttccttttcttgcttcattttcctggctataatttcttgtactatgttgagtatgagtggtgagggtggtcatccctaccttgttcctaatcttagggagaaagaatttgtctttcaatgagtaagtctgatgttacctctgggattttttggtagatgctctttatgtgtttgaggtaaatcttgtctagttctagtttttttgagtgtttttaccttgaataggtgttggatactttgtagatattaaaaatactatgaagggagactggattattcttttttagctggaaatagagtagtatgtgaattagaatgataaagtctgactgttgtctcaggcatacaatacttaaggcaccaaagacattaactggctctgaatcaacttcatgtatttctctatttagggaaagatttattaacataattacatgtgactattctttcttattttggcttttaaaatagatgttcctttaacataaacatttttaaaaagcatactttgtcagtatctttgtcggttctgccactgatattgttcccataaaaccaacccttattttactttcagggaaaaaaaaaatacttcatgtggttaaagaatcatgttgtatgttttatagtgccttccatgctcttgcaattttccagtgacagctatatattcttacattgcagagcagcctgcctctttagtcttcgtttcaaaataaaaccaaaaagaagaaaaaattacagaaatgttgttaagaatagtacaaaacccttttttttttgttttttgccttctgagtcatttgatagtgagctgtttacttgatgccccatcatccccaaatactttattgtgtgtttcctataaaattattctcctacgcaactacgacaaagccatcagcaacagggaaataacacttaggcattaccaccacctaatcctcagacttcattcatcttattcccttaatgtcctttatggcaaaagaaaggattccctttgaaatgtctctttaagatttctttaatctggactagtttctctctctttacttgcctttatatctttgacattttttgaagagtacaggccagttacttgagtgattgtgtcttgatttggctttctctgatgttttctcatgagtaggttcaagttatacatctttggcgggaagatcttcagaaatgatgctttttttctctctcagtgcatcttatcaagtaacacctgactttgatttgtcctattattggtgatgttaactttgatcagttgattaaggtggtgtctgccaggtttctccactgtaaggttattttttcctcttcgcagttaaatgtattttgtgaggaggttctttgaggctatgtaaatttccccttcctcttcaaactttcacccctcttgaattcctgtgctctgcaccttgctgtccctctataggaatgcccttttcaccctttctggttctaacacccagcaaagaggctcttctgaacctgcacaggccatcctgctgcctgggagtgatacctgcctcactccatttctgctctcctgcccaatatggatgcccttttcacctcctggtctttgacaccccaggccaggctgccttgtcatgcagatgcccatcccattgtgccgcagctctgtcaccctgtgctggttgccccctgtagagatgccccatgttcttcttgggctctgagaccctgtgctgggctgcctgtcttggtggatgctcttaccctgctcatacttttttattttttatttttgagatagagtcttgccctgttgccaggctggagtgcagcggcacgatcttggatcactgcagcctctgcctcctggattcaagcgattctcttctctcagcctccttagtagctgggactatgggcacccaccaccacacctggctaatttttgtatttttaggtagagatttgtatttttagatagagtttcaccatgttggccatgctggtctcaaactcctgacctcaagtgatctgcctgcctcggcctcccaaagtgctgggattacaggtgtgagccaccacgccacgtccctgctcagactttgataccttatgccaaactgcccctctttgtggccagcccagccctccttgtgtctctggcattgatagcccatattgattcaccctcccatacagaggccttcctcatcctgtgtgtgccctgacaccctcttccccttggatgggctctgatcacgtttcctaaggctgctctctgccttcccccagctcagccacctgcttttatcagtcccacctattgtctttatgctgaatttgtctagaagggtagggaggtaaaaggaactgcagtccctcttggtattcttaatcagccccctgttgtttgctttttcacctttttttttttctaccttttcatgaagagtggttagagataatttataacatttgaaatgtaaaattattttcttagaaaaaaccaggtgactataatcctttgaataaatgtgcaaagcctgatgattttggatattttcaaagaaataatccctgaatattggagtgaagacatcccatatcacagtacctaatgtcagatggcaaatagctagcatggaatcagcttgcttcagttcagcctgtagagccaaagatccatcctggcactgccttctggtttccagcttaagacacctctttgcaagtcacaacatctctttctatttctgtttccgcatccataagatgggggttataaatacttaggtcatggggttgttggggagctcagatgagataatgcatttgaaaatgcaagtgggaaaatgctatgcaaatgtggttatttagttctaatttattacctagtcaaaattgaaatgtataggaaattaagtcaagcattttaattgcacttgtgatttgtaggcaaattccctctgagtcataaggcagataaaaggtcggcatggttttgtttttgctgccacttttaagtccattgtgttgtcactattactcaaccaggtaaacactcctcttttgaagttctgcccacctgttacgcctctgtgacatactgccaccttctagatgatttttacctctggtgtacaactgtcctccctaccccagtgcctgttttctgtcatctttggtgacatcagcttcattggccttaacatgagttctttcatgcatctacaatagcttgtggcacagttctgcttgcatatatcactggttagggatctcaaagtgaacatgtctaatgatcaagttacactcttctcccctgacctgctcctccctagagcttccatttatgttactggtgtcactctttgtattagccttgtagattggaaacttttaactcttccctctgtcatctcccatgtctagtcagtcagtaagttcttttatttttgcaaccatctcttctccacttgagcatctatttccccataattaatggtgtattcctttaaatctaatctctgaactcttaaaatagccttcttcaaggcaaatgttagaacctcagcttgccaggtcccagactggtcctctgctgaataattggatgaaaaagaccatggggcctaagtcacttctctgagtcagcccttccggatgaaccagtcagatgttacaggacatgtctccagagacctgtaaaaacctctagatggtagggttcaggcttggggaagaagacttaccatgttaggcccaaactcgtgcctggaagcatctagaatctgaaaggacctgttctgtatagcatgaattccagtatctaaatatagcaactgtaaacattttggtgcattttcttttattttttcttttgcatgtctataattatactgtatgtgttcattcatcacatctgttaaatgaaaacattttaatgatattttagtaagtgcatttttaaaattggtgtgtaacacggatgccccttgacttaggatggggttacatcctggcaaagtgaaaattcatatgttggaaatgtgcttaatacacccaacctactgaacatcatagcttagcccatcctctcttaaatgtgcttgtacacttaaattagcctataattgggcaaaatcatctggcaaaacagtccactgtagattattagttgtttaccttcttgatcgtgtggctgactgggagcagtggttcattgcccagcatctcgagagagcgttgtagtgcatatcactggcctgaaaaagatgaaaattcaaaatttgacacatgggctctactgaatgtatattacttttgcaccattgtaaggttgaaaaattataagtcgaatcattgtaagttggagaccatctttgcttcagagaatgaaagattgctatccatgtttctgttagaacaagaagatcccttccaagaaataccagactctctgtcagagcttaaccccagcttctgctgagagtgtttgtttagtgttaatttttgattgctgacaactagtctgtttttctcctacctcggtcatgatgcctactcattaagttacctttctgctttcttggtctcgcttatttgttcattcatgtatttattcttttattattcattctccaataataatagcatagtctcttctatctcctgagtttggctctgaagacttaaagattgcttagttcatcgagggactatttatttttgaatcgttgccaggatgtaccacgggcccatctgtgggcacatagaaagcagtgccttcctttctgaagagagtagagaaagcttcctgggggaggtgacgtgtacactgctctatgaaagatgagtagcaggagttggttagggcagacaggtggaagatacatttaggcagtgggcacagaaatgagaacagtggtgatggtgtggctccagcttacctctaggtttttgtttttgtttttgttttttaacagctgtattgagataataattcctatgccatgaaattcactcatttgaaatacacagttttcatagagtcaatttaaaacattttcaataccacacaaagacactccacatcctttagctgagcccactcagtcctcctatccctctcagccctaggcaatcaccagtctactttctgtgctgtggatttgtctcttctggacatgcgtttgaggtagaatcagacaacctatgttcttttgtgcctgacctctttcacttacataatgttttcaagattcgcctatgttgtgtgtatcagcacttcatttcttttgattgctgaataatattccattgcataaatataccacattttatttatccatttatcacttgatggacattgggttgtttctgctttttggctattaggaataatgctgttattaacattgatgtacaagtttttatgtgaacacgttttcatttttctggggtatatacttaggagaggaattgctagattatatgttaactctctgtttaacaatttgaggaattgccagattattttccaaagcagccaaaccattttacattttgattaggagcatatgagggttccagttcacgtccttgccaacagttactacttttaaaaaagtatagccatcctagtagatgtgaagtgctatctcattgtggttttaatttgtatttccccaatggctagtgatgttgagcctcttttcatgtgattgttggctatttatatgtctttggagaaatgtctattcagatctcttgcccatttttaaattggattgtctttttgttattgagttgtgatagtattttctttttaattatgaaattggtagttgttttgaccaagtaagtttgctaggtcaaaatctagaagtggttcttatattggagataatattctgcagattaatctaaagatctcttttaagatgtctctttaaaattctatactctagaattggtgccgatcctggaaatgtaccattctgagcagatgacttgtgttattgatttgtgccaaacaactaagggttgtgtataatctgaatggaaagcagatgttttggcagtttgctagtgagtggttttctcttggttagggcctgctcctttactaaatagaactattttcagtgtatcacttttcaaatatttgaataaggaaggagatttttgggggacatacaaatttatggatacaattgaattttttgaacaactttattattttatgtgtagtaaattctcaataacgacttattttctttttcatcaaaataaatgtttaactagctgcaaatagtatgtatcttattgacccagttttcaattatgcatatgtacagattatctatgactattaaaacaaactcttgctttctagtttgttgctagttccctgaattgccttaatggaaaccatagggagaaaggagattattgcaatggtccaggtgtgacatgatggcttatacaagagtggtggtggtagtagtgataagtagcaggtgtatttcacattattttggagataaaatacattgggaattgttggatttgccatggaagatggtgaggggaaaggaatgattaaacatgattccagcaaggtgtggtggctcatgcctgtaatcccagcactttgggaggacgaggcaggaggatcacctgaggtcaggagtttgagaccagcctgaccaacatggtgaaaccccgtctctactaaaaatacaaaattagccaggtatggtggctcatgcctgtaatcccagctacttgggaggctgaggcaggagaatcgcttgaacctgggaggtagaggttgcagtgagccaagactgcaccattgtactccagtctgggcaacaagagcaaaaccccgtctcaaaaaaaaaaaaaaaaaaaaagaagaaagaaaaaaaggatgattcctagggttctggtttcaccatttggggagatgtgccatttatggaactgtagaacactggaagaagtgaggtttagtcatttgcttattaggtctcaaatccaattctctgaccctctcagtcctgttttgtattgcatttcataggtatccttaccatttggcttttgtgagtagatctggacaattggaggcactgatggaagactggagggtaggagtagggagaaggtagggtatttttctccctccctttttactccgggtggtgtcccaggaagtggcagtttcattcctgtggcttcagctgtcagggagctccttccttcctttgtagtccctggtcccaaagggcaactcctgctattctagcccctgtcaaatgatcccagctattgggctcttataatacaggttgagtattttttattcaaatgcttaggaccagaagtgtttttgattttggattttttttttccagattttggaatatttgcattatacacttactggttgagcgtccctaatccaaagatccaaaatgttgaatttcctttgagcatcctgcggttactcaaaaagtttcagattttggagcattttgaatttcagagttttggattagggatactcaacctgtaccacctcttctagtgggtctccccagcccttaggctggtagtagcttcctgctgggaaaagggaggaaagattttcctctatcctcttagggtctttggctgagtctgaaaatcaaattgccaaagacagattaacagaagaaaaacattcaaatttatttaagttttatgtgacatgggaactttcacaaggaaatgaagacccaaagaaacaggtaaactttagtattttttatagtaggtttgaagaagagtggagagccatggagaaatatggtagggtaaaagagtgtgatctaatggtagtaaactgggggaaacatagtaggacctgattttgccagattcttctgtgtcccctcgtcttcagagataaggatgttcctttcctctgggtatagggagggcatgtctcagatgagggtcttacaacctgcttcaggggaaggtcagaaattttcttctaggttttatgacttgtttcaggggagacaagagggacaaggtcagagagaccttcctgcttctgctatttttcagatctcttccatttaaaatactcactatgtcgaggtggtatattttggggtagtgtgctctgagccccatcactgctgttgttcattttggtgttccttcccattccctgtttggagtcttggatcttctattgccatgtaaccacatttctctgttaatttgtatctgttttaatgcttagagtggtttcttttttcctaactagaacctgatgaatacagggtgaaaatttgagagttcaattttggaaattatttgtgtcaagtttagtatttctgtgatgcattccagtgatgttcttaggtgagttggatagtgagctcagatgcgtgtgtgaactagaagtataaatttggctatcatctcagccaaatggtagtatttcaaaccatgggagggatggatgggatcatctagtacacagaagagaagggaatccaaatctaggtcctctgaaactccgagtcctgagaggtgggatgggggagggagatggataaagtagaaaggccagggagagtgatgctgttgataacataaagaaaggattgttggcggggtgaagtggcccatgcctgtaatcccacactttgggaggccgaggcgggtggatcatctgaggtcaggagttcgagaccagcctggccaacatggtgaaaccccgtctctactaaaaatacaaaaattagccaggtatggtggtgtatgcctgtaatcccagctactcgggaggctgagactggagaattgcttgaacccgggaagcagaagttgcagtgagcggaaatcgcaccactgcactccagcctgggtgacagagtgagactccgtctcaaaaaaaaaaaaaaaagaaaaaagaaaaaagaaaggactgtttcactgctttgtgcattctgccaaatgtttatggtgtcagttaccttgatgaaagcagttttagggacacggtgggtagttgagggtcttcaccaaaatgaagtggtagatgagtgaatgtgaggtgacagagtatagctcgtgcatagagagagttctttcgagatgtttgataatgaagggggagtaaacaaatgaggaaggccgggcacagtggctcacacctgtaatctcagcactctgggaggccgaggcgggaggatcacttgaggtcaggagttcaagaccagcctggccaatatggtgaaaccccacctcaactaaaaatacaaaaattagccgggtgtggtggcgggtgcctgtagtcccacctactcgggaggctgaggcaggagaatcgcttgaacctgggaggcagaggttgcactgagccaagactgtgccactgcactccagcctgggcaacagagcgaaactctgtctcaacaacaacaaaaaagaaatgaggagatagcaggaagatgtattaagaaaagctacagtttttatgattgccttttactttaaaaatatttaatttttagaatagtttctaaatgaaagtagaagtcatacaaggaaaagttttcctcttctttcccattaactcttttttactcccttctcccagccccagcatatagccactgctgtgtgtttctggtatacatccaaaaaaattttatgtaaataccagcaaatgtgattatatattctagattttccccttcttatccctagggatagcctactgtatatatttttattgtcttatttttttttctctgaataatatgacctggagatctttctgcattggaacttagaggttattcatttgtttataggaatatttgttctgaaggtactaaaatatttgtaaccagtcattttttacgattacaaataatacctgtatgtttgcagtaggctaacttcttaaaaggtgaactgctaggtctgagaatatgcacctgccatttcagtagatactgtcatattacctccttaagtggcgatctggtatctatgcccaccagcaaagcatgaagagtactgttttctcacagttacatcagtatagtgtgctatcaaacttttggatttttgacagtctagtaagtgaaaaatagtattttttttaaaaagtgcagttttagttttcatttgttaagaatgaagttgaacatctctttgtatgttcaagaaccatatgtgtttcattttttcatgaactctcagttcatatttgttgcccgtttttttctattagctttggtcttttaagtttttgagttttgtatgttaggcctaagggcctgacagctcactgtggctgtaacattgcttgtaagatgggcctggtgagcagtagttttggattggggcatggtggctggatcgtgaagggccctggaaagtccatttggtgtttatataggctcttggtttataaaactttttttgacttacagaaatagtatcttattagagattctttttttttttttttgagacggagtctcactctgtctccaggctggagtgcagtggcgcgatctcagctcactgcaacctccaactccctggttcaagcgattctcctcccaagtatctgggattacaaacgcgcgccaccataagtatctgggattacaaacacgcgccaccatgcccagctaatttttgtatttttagtagagacggggtttcaccatgttggtcatgatggtctcgatctcttgacatcatgatccgcctgcctcggcctcctaaagtgctaggattataggcatgaaccaccgcgcccggcctagggattctctagatgcagtaacttctgaaataattatatgtcaaaatcaatagagcaatttaatttggaatgaggatggggaatattaataatgttcttttctacatggtaagtacaacgtctgtcttgtacctgatttgactatgaccaggcctacttagctatggggtaatagccataattaattttcaatagttactggtagagctttgccagctattatttttcatttaaaagaaaaaatcgtctttcatataatgaacagacttcaagttgacccttggtttcctcatcttatttctatgaagcactcagggggactattttaagagaacaaactcattatataagtaatctccgagaataactgcttcttcctagtagcttctatttcctttagtcagagactcactctacagacaccaccaccatacaaagggccagttcatactcttgagagtttcagaatgggagcataggtactctttgtcagtgtcttcctatcatttctcctctactctttcctccttttcccccctttttctgctcgttctcccagcgctccaaccctagctggcttaaaggaaaatactttatcatgaatcacttttattctttttagaaaacagattttgaaaacatggttactccatgctgagcattgtgtaagtccaaataaagaaaaataaatgaaatgtaaagaaaaaaattaatctattgaccagaatttttattttgttttctttttgttttttgagttggagtctcgctctgctgctcaggctggagtgccgtggtgcgatctcggctcactgcaacctccgcctcccatgttcaagtgattcttctgcctcagcctcccgagtagctgggattacaggcatgtgccaccacgcccaactaatttttgtatttttagtagagatggggtttcaccatgttggtgaagctggtcttgaactcctgacctcgtgatccgcccgccttggcctcccagagtgctgggattacaggcgcgagccaccgcgccgaccattttcattggttttaagaagttatttttcaagttgtaccttaagggtgctttcgaattctcttattaaagcatactctattctcagtttttagtaggcagtcaatgatttgtgttacgtaaataaaccctctgggtatgggtaaacgtactgcacacttaaaatgtttggacttgacttgtcttccagagttctgtggtaaagaaactctcaaaacatgctttttgggttcaagacaatcaaactgttttctctctttgttttgttcttactgaatttttatttgtatcaacctccataccctccttacttaaatccatgaatagactccttttattgttttgtgttgtttcttgggttgattttcaaatggaactgttgtgtaagataaaggtttgttctcctgaatagtgttgatgtgaaccgtgctgtctcttctataatgccaccattatgcagaagcctgcagggggaagggcagattcgtagttgtgagagtctgcctgtgctttagggtaataatcctgcattcattattaatctccctttgcttccatgtctcctgctcattaccaaaggccaagacatgacatgttcaagatcttagaaattttgaaaatagcagaacggctgcttttgaagcccgattgttagtcttagaaatgacaactgtaaggccatgtaatattacttattttagtttttagatattgtctacattgttttttgatcaataggcaaagagccactaatgagccattataatttccttaaattcacagtctctggagtcagtttgtctgggtttgtaatccctgccaaccctctcaccgtgtgattctaggcaagttacttttcttttctagaccttaggttcctcctctataaaattggaataaaaatgaaggtcaacgtgggaggattacatgaaaaaatgaatgtgacaggccaagtttattgctggatatataataggtactcaataatgttagctattatcgttattactaatcagatttttattaccctggatttaaaaataatttttctgtatataaagaaatagtttggaaagtaaagtgtttcaattacaacaatagtttatttcttttgttggtgactattattttcttggttcggtgagtccaaaagcttttagcaggcaagggaaaagtcccttggaaaatgtatatcaggtcactgtttttctgatggatcacagcaggaaaatagtttatgttctcaccttaaaataaaaggaagctattgattccaagctgtatggaaagggaaacttaaaaacatttaaaaagcgttgataagttttttaagggaaaaaagggcaatgcatgcttttaacaattcaaacagtacagatagatataaattaaatattcatgtgtcccttctcaggattaagcattaaaaaattataaaagtagtatccatgcaagtttaaaaaaaaagagaaagaatataaaagatgcacatgaatacaatattggagcccactgaacctttatcttgccttcaagggcaaaccagtttttcatgtatacttctatccattttctttgcttagaacagaatttcccttttttctttttcctttgtaaaacacaaagtagatactagacatattcttctacaccttgctttgtttcttctgataatatcacagagattgttacaaattggcacgtagagatttatgttgctttctaaacaggcatgatatttcagctgcagtcccgtaatttatttaaccagtgtcgttatagtggatatgttggctttttatgttttttgccttgtcaataatcttcaatgagaattacttatttatatatgtttgtgtgtgtgcgtgcgtgtgtgtacacatgtgtatgggtatgtgatgtaagtatcctacaagcacatgtaggagaaattctgacgtgcatatatatttgctagttttttctactttgccttccaaagagtttcatcagcgtagcctgccatcagcagagggagaggttgccagttttcccattcttttgcttgcactggatagtatcgcacttaatattttctattttgatacgagaatataggatctcattttgttttgcattttaaaattatgcgagatcaatgtatatcaggataaattcctaatagatccgagatataaatgcaaaaccatatgtgtattagaagaaaacatgggtgaattacttagtaatttgggaatagaggaagtgttctaataatgactcaaaacccatcagcaataacagaaaagagtgacacatttgctattttagaaataaaaaagtatgaagaaacgataaaaaagtaaaatgacaaactggaaaaaatgttgtgacttctatcatagatatagatagggttgatatcctatgtggcgtatgtgtatgagtaaattaaaatttgagatgaaaataactattagcctgatagaaaaatgggcaaaaaataggtacagatgaaaagatgaaaaacagaaaaaaaaaaaaaaaacactgcgaggggcccttatgcgtgaaaaggtgcccagctcactcataataagaaaaatgcatgttacaccctcactgttgtttttcaccagattggcggaagtccaaagttttcatagcagactccagggtcaaggctgcaggtaaagggcactcacaggccctgctcatgggagtgcaaagtggcacacctttgtggagaagaattttacagtatgtaatggaatttcatgagaatttatcctctgaccccacattcccacctttttggactcgattccaaaagtaatctgggaaacataaaaatgacatgtgtacattgctactcattgcagtactgtttgtaataaagaaagactgtatgccactgccctccagcctgggcgacacagtgagactttgtctcaaacaacaacaacaacaacaacaacaacaacaacaacaacaacaacagactgtaaataataagatattgaaatctagattccatctgtctagcctgaagtttgcagctctccaaaatagatctgatatcccaactttggcattggcaatatttagcttatgtgcagatggttttcagctgcatatcagaggttacgagcactctaaggggttctaacgctcaaatctcgaagtaggtggagttctttcttgggcactctctaagttggtgccttcttcctacctttcccttccctggtccactcttgtccatctgcctggcccttctttccttcagtgcccttctctaatattgcttctccttttaaggcactggaggacctggcatgaatgttctaaggcaagatcagaaggtgttaacctcttagcaggtatttgctctgatgaccagatcatctaaaagtggcagtgtgtttgtatatttattttattatttattccacctccacttatccaaattaatgtatgaaattgggatgtatcttaaaattgataagaacttgcatttaacttctacccctctggaagagtttttgcagagttgatggtgtttctcgtagttgatggcatcttagaagcccaacaatgtgtgcataagggggtaagccatgtggaatcaccattatttattggcaaatagccatagacagttttccttctcacttttcatttttagtgagtttgttttctgtgttatttcataaataaggcctctgctgggtgattgtgggttggctcagagctagcaaatactctaaattgagaaaggaaaagtttagggtattatctttttgttaacaatattaacatttatacagatatctgtcttgaattcttagcatttgacataattaattattccctctttttttcccttctttttttgagacagaatcttgctgtgtagcccaggctggagtgcagtggtgcaatcacagttcactgcaacctctgcctcctgggatcaagcgaatttcctgtctcagcctcctgagtagctgggactataggcatgcgccaccatgcctggctaatttttgtatttttacaaaatacaaagagacaggattttgccacgttggtcaggctggtcttgaactcctgacctcaagtaatttgcccgcctctgcctcctgcagtgctggaattacaggcacaagccaccgtgtctggcctgctttttttttttttttaatttatttttaattttttaaaatcagataggctctttaagactgtaaactccctgagggtagagattctattcacagccgtatccccagtacccagagtacagcctggcacgtagtgaatcctgattgcctattgtttgttgattgactgatttatgcctctaagaggaactatcttttgataatattaaataagatgtcctaatacaaaactgatagagttcagaaataattaagaatctcctggccaggcgtggtggctcacgcctttaatcccagcactttggaaggctgaggtgggcggatcacgagatcaggagattgagaccatcctggctaacatggtgaaaccctgtctctactaaaaatacaaaaaaaaattagccgggtgtgatggcgggtgcctgtagtcccagctactcaggaggctgaggcaggagaatggcgtgaacccgggaggcagagcttgcagtgagccgagatctctagcctgggcaacagagcgagactccgtctcaaaacaaaaacaaaaacaaaaacacaacaaaaaaaagaatctcctatgttcagcgggaaaggaatatttgttgggtgggggggttcctaaaagattatgtaattttttggcattttgacatattcacagaattcctattgattgaggttactgcatcaagtatagtacagtcatgtgttgcttaagcacaggaatttgttctgagaaatgtgtcaggctattttgttatcatgcgaacatcatcaagtgtacccacacaaacctagattgtacagcctatgacatatctaggccattatatggtatagcctattgctcccaggctacacacctgtacagcatattgccgtattgaataccgtaggcactgcagagcatctaaactagaaaaggtacagtaaaaatatggtatgaaaaatttaaaatggtgcacctgtctaagacacttactatgaatggagcttgcaggactggaagttgctctgggtgagtcagtgagtgggtggtgagtgaatgtgaaggcctgggacataccctgcaccctactgtagactttataaacactgtacacttaggctacactaaatttatacaaaatatttttctttcataataataaattaaccttagcttactataatatttttactttatgaaccttttaatttttgaaaacgttttcacactcttgtaataacacttaaaacacaagtatattgtacagctgaacaaaaatatttccttattgtttaagtgtttaaaattaaattttatttacttatggccaggcgcagtggctcacacctgtaatgctagcagtttgggaggccgaggcaggtagatcacgaggtcaagagattgagaccatcctggccaacatgatgaaaccccgtctgtactaaaaatacaaaaagttagccaggtgtggtggcaggtgcctgtagtcccagctacttgggcggctgaggcaggagaatcacttgggcccgggaggcggaggttgcagtgagccgagattgcgccactgtactctagcctggtgacagagtgagactctgtctcaaataaataaataaataaataaataaaaataaataaataattttattttatttatttattttatttttaaaattttatttatttttactttttaaatgtgtttgttaaacgctaagacagaaacatacacatgagcctaggcctacaaagggcaggatcatcaatattactgtcttccagcaacacatcttgtcccactggaagatcttcaggggcaataacatgtatgcagctgtcatctcctatgttagcaatgccttaccttcttctggaatacctgcctcctggaggacctttctgaggctatttcacggttaaattttttttttttttttttttttttgtgagacagagtctcactctgtcacccaggctggagtgcagtggtgcaatctcagctcactgcaacctctgtcccccaggttcaagcaattcttctgcctcagcctcccgagtagctgggattacaggcgcctgctactgcacccggctaatttttgtatttttagtagaaatggggtttcactatcttggtcaggctggtcttgaactgctgacctcgtgatccagccacctcggcctcccaaagtgctgggattacaggtgtgagccactgcacctggccaacttttttctttcttcttcctttttttttttttaaataagtagaaggagtacattaaaatagtgatgaaaagtattctatagtaaatactaagtgataggaatttttaagctccattatactcttgtgtatcaactgtcatatatgtggtccatcgttgactgaaatgtcattatgcaacacatgttttccctttattttgaaaccaatgttggcaaaattccaaagtacaataatttgcattatttattcattgtcatacttcttgaggggtcctatggtaagagttatctagtgacttgaaaatgactgggtagaagaatgtgccaggatataaagctggcatctgatacagatagttcagatggattaggattatctgtcattaggattatttatttattttgagacagagttttgctcttgttgcccaggctggagtatggtggcacgatctcggcttactgcaacctccacctcctgagttcaagcaattcttctgcctcagcctcctgagtagctgggattacaggtgcccgcccccacgcccggctaattttttgtattattagtagagatggggtttcatcatgttggccaggctggtctcgaactcctaacctcaggtgatccacccgcctcggcctcccaaagtgccgggattacaggcgtgagcacctgcacccggcccttatttatttgttttgaaataaactaacaattgctagtttttttttatcattagctagcagacatctgtgacattttcttgtctgcataatatggttctcatagtattgctttgtcatttgaaattcaacattcattcagcaaatatttaaggagtatctcccatgtagcaggccctgtaataagtgctggggatatagttacgagtaaggtgtgagtctcagtcctaaatctttgttaaatacaacagtgaagcttgtttcttgaagctcatttctaacgatcactatggccttccaagctttaggagattggagaagcgccatatgcatgtggtcccacacattgcccctctgtcatcctcccctcaccctttacctacttgcatattgtttagtgtgccgtgacaatttgaatgtctactctgtgcccatcactctgttgggatttgaacgttcaaggagcagcagataaaaatgtattcagtatctcttaaatagtagtaaagacaggccaaaaaatgaatgattttcagtgtacaagaattgtctacacacagtctgttataggaattcagagaagaaagagtactaggatcagattgatagtagaggaatatcactcaggtggcattgggaataatttggaggatactaacaggaggtaggtgaataatcttttctgagttgagtagggaagtgacataattgatttatgttttatataaggcactctggctgctgggtggcaaattagactatggtctgggggtagaggaaatgaatgcaagaaatgagtcaggttagcaaggatcatagtattcagctgataaatagtgtaagtagtttccatgcctttcattgtttcaacattttttttttttagctgggcatggtggtgggcgcctgtaatcccagctactcaggaggctgaggcaggagaatgtcgtgaacccaggagacggaggttgcagtgagcggagatcatgccactgcactccagcctgggtgacagagcgagactctgtctcaaaaaaaaaaaaaatatttttttttgccatgtttataataaaatactgggggaattttttttttttttttagatggagtcttgctccatcgcacaggctggaatgcagtggcataatgatctcggctcactgcaacctctgcctcccgggttcaagcaattctctgcctcagcctcctgaatagctgagagtacaggcatgcccgccaccacacccggctaatttttgtatttttagtagagaccgggtttcaccatcttggcccaactggtcttgaactacggacctcatgatccaccctccacagcctcccaaagtgctgggattacgggagtgagccactgcgcccggtagaattttttggcgtgtgtgccaagttaccagaaactctgatgtgcttaccagtcctcccacctagtgctcttatttgaatctttcttcctaggtggagaatctacacatagacatctgtatgttctcttagttcatgtcatttgatcttagcttctgttcttatacagatactgttgaaggtgctgcagttttcaattttggttttcctttctttatggtaatcctattttaatatataagatcctttcaggcaactgaagtatgcaagaggcaggtggaatagtagcaactttaggtattaaaaattcatataataaatatgatgggtttggattatttgttgcattgccagtgagtttattatagtatataacaatatttaatcaaaatggtgataggaataaaaggcccactttgaggtaaatcattaatttttaaggcagacaagttaggtttttaagaatttctcaagctgaagaatattcagtgtacactctgtgcctgaaaaagcttaacacataatccacaaaggtgaaattgatttgatactcagagttaagattagggcaagtttcactttagtttgtggaaattattagatagtactgtcaagcattgaaagtaaaggaagagaatgcttatcattacattttaagtgaaaagatatagcatagattacacatttttatatttattgttcacaaatatttccatgttctagcaattttctactgtgttgtaattgcctgttcattttactccactgtttttctctcccctaccgcagcaatcccagtgccactggatatttttgaatgattaagtgtgctacttacttcttttttgtgttcatttttttaatagaaaatgcatccgatgcagatttatggctcctgaacagttgcactgtaaaaaacccagctgaagaccactttagaaactcaattaagtaagtagaaattgattttttcctattttgtataatcaaagtaagaattgataccaaaagattagctttttaaaaatgtcaatatagatatttagtttatattaaaaaagtatgagttggacttttaagattatactattttgaatttgtctgatacagaatgatgctttttttattttttatttttaaattaaatttactttaagttctggggtacatgtacaggatgtgcaagtttgttacataggcaaacatgtgccatgatggtttgctgcacctatcaacccatcacctaggtattaagccctatatgcattagctatttatcctgatgctctcccttcccccaccccctaacaggcccaactgtatgttgttcccctccctgtgtccatgtgttctcattgttcagctcccacttgtaagtgagaacatgcagtgtttgtttttctgttcctgtattagtttggtgcggatgacggcttccagctccatctgtgtgcttgcaaaggatgtgatctcatttctttttatggctgcatagtattccatggtgtatatgcaccacaatttctttagtctgtcattgatgggaatttgggttgattccatgtctttgctattgtgaatagtgctgcaatgaacatatgtgtgcatgtatctttttaatagaatgatttatgttccttcggggatatacccagtaatggcattgctggatcaaatggcctttctggttctaggtctttgagaaatcgccacactgtcttccacaatggtttaattaatttacattcccaccaacagtgtaaaagtgttcctatttatccacagcctcgccagcatctgttgtttgttgacttttaataatcgccattctgactggcgtgaaatggtacctcattgtggttttggcttgcatttctctaatgatcagagatgttgaactttttttcatatgtttttttgctgcataaatgtcttttgagaagtgtccatgtgctttgcccactttttaatggggttgtttgttttttttcctatatatctgtttacattccttatagattctggatatcagacctttgttatgtggatagattgcaaaaattttctcccattctataggttgtctgttcactctgatgatagtttcttttgctatgcagaagctctttaattagattccatttgtcaatttttgcttttgtcgaaattgcttttgatgttttcatcatgaaatctttgcctgtgcctatgtcctgaatggtattgcctaggttttcttcttgggtttttgaagttttgggctttacatttaagtctttaatccatcttgagttaatttttgtataaggtataaggaaggggtccagtttcagttttctgcacaaggctagccagttttcccagcaccatttatcaagtagggaatcctctccccattgcttgtttttgtcaggtttgttgaagatcagatggttgtagatgtgcggtcttatttctgagttctctattctgtttccttggtctatgtatctgtttttacaccagtcctatgaagttttggttactgtagccttgtagtatagtttgaagttgggtagcgcgatgcccctagttttgttcttttttcttaggattgtcttggctatatgggctcttttttggtttcatatgaattttaaagtttttttttctaattctatgaagaatgtcaatggtagtttaatgggaatagtattgaatctacaaattactttgggcagtatggccattttcatgatattgattcttcctatccatgagcatggaatgttttaccatttgtttgtttcctctcttatttccttgggcagtggtttgtagttctcctcgaagaggtccttcacttcccttgttagctgttttcctaggtattttattctttttgtggcaattgtaaatgggagttcattcatgatttggctctcagtttgtctattgttgctgtataggaatgcttgtgatttttgcacattgattttatatcctgagagtttactgaagttgcttattaggttaagaagtttttgggctgagacgatggggttttctaggaataggatcatgtcatctgcaaacagagacagtttgacttcctctctttctatttgaatacgctttatttttttctcttgcctgattgccctggccagaacttccaatgctgtgttgaataggagtggtgagagagggcatccttgtcttgtgcccgttttcaaagggaatgcttccagcttttgctcattcagtatgatatgggctgtgggtttgtcataaatggcccttattattttgaggtctgttccatcaatacttagtttattgagagtttttaacatgaagggatgttgaattttattgaagaccttttctgtattgagaaaatcatgtggtttttgtctttagttctgtttatgtgatgaattatgtttattgatttacatatgttgaaccagcctcgcatccagggatgaagcccacttgatcatggtggataagctttttgatgtgctgctggattcggtttgcccagtattttattgaggatttttgcattgatgttcatcatggatattgacctgaagttttctttttttgttgtatctctgccaggttttggtatcaggatgatgctggcctcataaaatgagttaggaagaaatcccttgttttcagttgtttggagtagtttcaggaggatggctttttgaagggttttttgtgtgtctatctccttaagagtaatactttaatgggaacttttctaataagtaatttcagtatttgtgaagttagctaataggtgatttttgagtatttgttaagtgttaactatgtgttcttctcggagaatcaatgcatactttgtgaagttgcctgacacagtccttgcctcttttccctgcccattagcactgttctaagtgctgcagtacctggctttcaacggaattgcactttgttgaagggaggtgggcatattaagtccttgcttctttctttgttccctcaagttaacgtggaagaagtatccttttttcacattttctctgaatcttatctccatggatcttcttagaaaccttcttctagaaattatttcctcattccatatttccaacctctccaactcccctggaaccttttcattggtatttaaacatacctgggtctaatcggccccctgtgcccctgttagctattgtcctacattttttcttgccttcccagccagacttttaaaaattcttctcttcttaatttcattcttatactcattctttttcccctttattggttttattgtgaaatatattaaacatacattagcgtttataaaacacatacagtttaaataataataaacacttaaacatctgccacccagtgtaagaagtataacattgtcaagaccgtagaaactgccgtgttttcaatcataactcccaagaagtaacctttatcttgacttttgtgagtcatttccttacttttattagttaatgtatcatctattaagtatgtctttaaacagtgtgttgtcttgtttagccgtattttgaactttatctgttgaacttatactgtttgtgttcttctgagatttacatctttttctcagcattacgctttgagatttattcatgttaatgggtgtaaattcatagaatttgctacaatttattcattttattattaatagagttttgaatttttcccagtgttttgctttcatggacattcctgctatgactattttaaacatgttttccggtgcacatgtgtaagaattattctagaatatgaacctgggagttgagttactgggtaacatatctgtgtacattcaaactttattaggtaacgccaatttcttttcacgaatggatgtagtagtgtgcattctcaccagtaatggatgtgtgcatttgttgttttccatttttgtcagcacttgatatggccagacttaagtttttgcaagtctgttggtgatgatggtatttcgttttggttttaatttacatttcctttttttcttttcttgagacaggctctcaccctgtcgcccaggctgaagtgcagtggcaggatctcggctcactgcaacctctgcctctcgtgttcaaaggattctcctgcctcagcctcccgggtacctgggatcacaggcgggcgccaccacacccggctaatttttttttttttttgagagggagtctcactctgtcaccagcctggagtgcagtggggcaatcttgtctcgctacaacctccaactcccgggttcaagtgattctcctgcctcagcctctcgagtaggtgggattacaggcgtgcaccaccacacccagctaatttttgtttttagtagagatggagtttcaccatgttggccaggatgatctcaatctcctgacctcgtgatccgcctgcctcggcctcccaaagtgctgggattacagacgtgagccactgcgcctagtcaattttttatatttttagtagagatgcggtttcaccgtgttggccaggctggtcttgaacttctgacttcaagtgatccacccaccttggcctcccaaagtgttgggattacaggcatgagccaccgcgcctagtcagttttttgtatttttagtagagatgtggtttcactgtgttggccaggctgatctcgaacttctgacctcaagtgatccacctgcctcggcctcccaaagtactgggattacaggcgtgagccactgtgcccggcctttgttgcatttctgtgatcattaatgagtttgggctttttaaaatagatctattggctatttggattttacttttttggtaaaatggcttctcaggtcatttgtctatttttctggtttttttttttcattttaatcatttatttgtggccatatattatgtgtcttacatatcctaatccttagatattatacacgttgcaaatatcttctcccaattgtggcttatcttttcattttcttttgtggtatcttttgatgaagataaattctggtttaaagtttattaatccgttctttttggtctgtgttcttattgtttaagaagtcttttcttactctgaagctattaagatattttcctatattttcttctaaaagtttcatggttttaccttttacatttaggtctataattcatctagagttgactgttattattttttattatggtatcagaaggggtccaattttatgtctttctctgtagataaccaattgtttcagtatcatttatttatttaagttctattctttcttcttttatctgtgcattgcccaccctctcatatgttgagtgtccatagatgtttgaatctgttctgggtcctctatttcattcctttgatctatttctttattctggttcttgttctacatagtcataagtagtacagagttacattaaggctacctatttgatagtgctagtacctttttgttcttctttaagagtgtatctgtttttaagttgaacaaggaatactgttgtgtgtttgtgattacatttaatttttagatgattttggggagaattgaatcttcacaattttgagttatccaactcttctatcctgactttttaaggattgattcttttctttctatagctcttgtgcatcttttagacttttttctcccaatgtagatattgaattattccagtgcgttaagaaaataaacttattctttcttcttttgcctgcacagtatgtactttatatttttatactactttaaatggtaaactttaaaaattttttgttttctgtttttactgccttggtcagggacttagttgtagtagcaatgtgaaggatggttgtgtgtaaggaagagtatagatcaggagtccagtgaggacagagtggttgtagtccaggtacagaggatctcatctaaagtggaggtgttcagaattggaaggaatacattgacttgagatggaagaattctttacatcaggggtctccaacccctgggctgtagacgtgtactcgtctgtggcctgttaggaactggctgcacagcaggaagtgagtggtaggcgagcaagcattactgcctgaggtctgcctgctattagatcagcagcagcattagattcttacaggagcacacatcctattgtgaactgtacatgtgagggatctaggttgtgcgctccttataagaatctaaactaatgcttggtgacctgaggtggaacagtttcaccccaacaccacacctcccacccccggtctgtggaaaaattatcttccatgaagccggttcttggtgccaaaaatgttggggggaccgctgctttacacattccacgttgtccaagatgactctaaggtctctggctagaatgaagtgaggaattctaggaagggagttattaagagatgacatgttttggttttgaatgtgctgtatttgaagttacagataaatattttaataagataatgaatatacttgagctttattgagtgtcttctatgtgacgggcagtgttctaagtgctttagatgaattagatattatctagcttaattcttgcagcctatcaatgagttgtagattccatttgtattcctgttttataggtgaagcagcatctgttttacagatgaaggtctctaaggctgctgttcagttcataaatggtagaagtgggattttaaccgaggcagtctgactagagtctgtgcatttaaccattttattactgtgcttcctagataaagatgtcaagtaagtggttgcagaattgaggcagatatcaaagaggtcaacactagaaacacaaatttaatattgtttgcatagagttgatagttgaatgtgatgtcatccttaattcaaaatggtggaaggaacagaggagttcttaccggagcgatggcaagaggcaagggaagggaggatggaagaggggagttagggtcaagtttaggagcagaagaaggacgaattaaactaaggcagagaatggtattcaccagatgctgtccgttttcagagaatgctttttttttttaatgagaagcctgtgattgtctcaaattatgtatttttctctgtagaaaggtaaacaagatacaaagatactttactgctactgataccccctatgtactgaacctagagaatatagtttctgtgattatcaactttataatgtaattaatggacatagttctagagtatttctaaaagtttaaaaactcaaatataacttgtgtcaatgggttttgttatatatgtgttattaatatggttcaaagtaatgaaatgctgtttgaatgattaagtagaaatggcaagaaaagtttgccatttaaacactacaaagctagtggtagcaagcacaggttcctttaatgtactattctgcttgattgaaagaaaatttaaaaagatattatatatgattaagtatttttaatggccttgaagacttttgatcatcacaactaattcttattaagataacacttaaactaacatttgatttctttccagaataaatacaatcctgtaaaaggtacaataacagttaacattgggaaaatatcagattgaggtgacatttatacatataaaatctttcagtgatggattactcttgtcaagcattttgctttattcagatatttttccagttgtcaccattgcctaacacaaaacagcaaagatgagtagtgtaacattgttaaatgttaagtcgtgctacacatgtgccttttctcatcctccagcaccatcctttccctttgctgtcctctcttgcatgcgttttggttttccatgagagtgaggtaaagcttagattcaaagagagcctgataagatgttgcttctccttctgttgcacccaatcctttatacccaaatgtaaagatttacagcagtggggtgggacctgtctttttctaacctggactctttacccatgattgcttcactttgctacttattcctgtgtgtcatcatctctcgatcatctgcttttgttttccttccagtacttcttggtgttaaatagttgttttaaattatgcatcacatcattttgtttctcttgagccaccacacaaaagatcaccttgttttgacaggaataaagaaagatgactctaagggatttactgtctttcatgtgattaatacagtctcaatgattaagatccagaaattgtgcatttgtgacatgacagttatggactgaattattttgtcgtttgttttggggcttaatacttttttcaaggttttacagtgtttgtattattgatattcagactgataaaagagtaagaattttaagtagcaaaaatagagataagagtgactttttggttgccttttcaccttagaaatctgaaatgttattgcccttactaatttagaaagaatcgctaggaagccccctgtgttatgatggcagcctgctggatgcatactagttcctcttgagcatttgtcagttgccctggctttgttttatccattagaccattttgatttagacaatatggcctttaacttgggggggttcttgagtaaataaaaaagatcaaaagtttcaaaaaataaaatttgctcttaatgatagtatcaaatcaaaaaactcctttggttaatgctttatagaagtgtgggatcttttccatgccacctacaggaggtcattcagaggctggtgaaaataaacacatcttgtgtgtcctatataaatgacagaaagaatagccagcttgctttgatcatggactgtcaacctctatttgaccttgtgcattattaacccaaatgggcactgtggtttagccatactgatagtggatagacaggagtcacttgtttttaactgcctttgcctgtagaaataaatggtaatgtcgaagggatggcttaggtatctgaatgtaattacttgaaacgacaattgaaaataaaggcagaactggataaagacaaaaaatgtgtgtttgagacagaggatatctgctttgtataacatcttttcactataggaaagcaccttccatgctattctgttgagcaaaacataaattattggattgttattcctattatgaaaatattgtttatgtagatttatttttgagttctttttcttcataaattgaagttgggggaggtaccagaatattatttcaacttgaacttgtaaagtaaattgctttcaaaaaagctgacttcataagaatagagaagtggttaccttttcagttagtaattatccagtttaaaagaattaaaaaaaaccctttccagttctcttgttaaccacattcactagtaattttcttttttaactaaacttctaaaagttacttttatttactttttgagaccgggtctcgttctgttgctcaggccggagtgcagtagcacgatcacggcttactgtagcctcatcctcctgggccaaagcaattctaccatctcagcctcatgagtagctgggactacaggcatacaccaccacacccagccaatctgttattattattattatttttttttagtagagagggggtcttgctatgttgttcaggctggtcttgaactcctgacctcaatcaagtgatcctcctgccttggcctcccaaagtgttggggattacaggcatgagccaccttgcctgacttccaaaattaatttttaattaaaaaaattttgtcattagaaggtaaaaaatcacagggttttgatttggccttttgtgagaaataagttagatgatgcaagttatttgagttatactttaaataatactatagtttgttgattttttgttaaacttagatattttaattttaactcttctaattatatgaaatggctatagtttagtatcagtttcatctttttgtttaaaatgttagtggcagattcagtgaatcattgtgtgcttttaccagtcacaatctccttttttcagctatccttgcccaccaaaaagtatccttttacatggaaagttagttcaaaatattagactgaattaattagtattattggttgggtattgtctaataagattgtctcccaacagtgctatgcttaatatgaatttacattttcctatcatttgtcatctccttccactgtttggatattgtctgtatgctgatttctcccaaatcttcgtctttgatctgtatatctccttacaggctccagccttgtatatcccactgcttccttgacttcgccatttggatgaccttgaccatggacacctcaaatcatcatgtcagggcctcctccttatctacctcaccttttctctagctagcatttccattagtattgcccatcttctttgattgtggtcatcaggaaattgcattatcatttcttagtgtaacaagggtttttaaaaaaaatttgttcaatgcctctctctcctacctcttttcttgccactgggctatagaattttacttcctccctgacattagaaagtttcccaagcacataatgtatttgcatatgttcttcccttccttggactgtcttctctctttcctccaaatgcatgccctcacctccacccaccccacattaatcccacctggctaaatagttgatctctggaactcatgtcagagataacacctgtggggtcatcgcccttctaagcttcacctcacctcttagctccaaggtctgttccatgctagttctttatcccatattaacaattaacatctgttgttgtgtagtatattctattatttgtttacatatttggcttgctactagattgtgagttttgaggttaggatactgacctcagaaaaattctttttatgaagcctttgacgctctgactctactgtgtaatgattttccttgtcctgggaaacagatatcattaatagacaaagaccatttgtcaacggttgtaagaatgttctcccaaggttgtagtgagtcccttgacagatacaggctgtgtatttgtagaaagggaaaaggacattctaacttcctaatttctaacttctaatattgtattcctgagggaagttgtaaaaggagtatctcccttcttggagtagtcacctggtcatgctggcaggatcttgtgctcctcactatcctaaatgagctccgggccagcttcagggctgtggccattagattagttaaagcatcatgtcttgagtgagagagtaggaaaggtggataaaaacctggttagtgtttggccttgagtttggcacacaattataattactcaatacatgtttgtataattaggttgaactggtttttcctctttttgggaaaagggtttagtatcgttatgctgtcattgcatcaagtcatcgttaatatatttatgttaagtacattgtaagttgtataagtaatataattgcattaatatcagaacacttgtcttacatttgagtttcaaattgtccagatttgagagtgagcaaaatacaccagatataccaccaaaattgaaaaaaaaatcaactgcttgctgttggggaagaagtagtaatgttggaaaggttgacttgatagaggattttgtaagatgagtgaaaaagatctaaaaggacagtgatgtctctgttattgactgaggtatccttggtctctagaatagtgcctgatgaacagcattgagttacttattcactgaattgaattgaaagatttgatgaaggccaaatttctctaaatacattcttgtttatggattaggtcttattatctatcatatgtgaatgaattcattttattcatcttatgtcacagttttgtttagtctattttctgttgttgcgaggattttgtaattttttcctcatgagtttgtttggagttgataatggtatttgaggagcaagttttctagaaacatagatgaagagttttttgtaaagtagggggtgagagttatgtatgttcagagcagcttctgaccatttcctattggaggcttcaagttgtcttctaactctggaaaaacatggagatgagtgagaggaaagacagaatattatcatgtgatgtatgccagtgagcagttttattggaaatacaaaagaaagtctattttagtgtttaattcctggtttacataaaaaaaaaccaaatgaaactgtaaacttacagttaaaagattagtaagttaatttgcaaatcagcaacagaaaaagcagttcagaggtggtaggccattttaaaatgcaaaactgagttttgtagatatccaaaatctttttgaagactagtattttgcatattttatgattaatgttacatcaacagttgctttgtttttgccattttaagcaagagagtgagtgaaagagggcagtgtattatgtgctggcaacagctggctgatagcattgaaatacttacataattaaatatatgtgttggctgttgtcctaacaactctgtaggtggaggctccagaaagcatgcagaaacttgctttagcaggattaaagaaaaaatcaacatgatctaagtctgttctttcagccaagagtgatttcctattgttttggtttgaaagacattctacttattcttggtgtgtgtgtttatataacagcagagaaaaaaaggctcttgtttttttcttcccttattgtttgctctaagagtgacaaacataatctttcataatttttagtcagtagtattgtttaataactgataataagtgaaataaaaaagactttttaaacccataggacatgttaccaaagtattaaatattaaccctttttatttcttacttatggttacacttaggtgtcgttctctgggccacattaatgaagttatttagattgtaggctatattaaggcatagattgctatgatcctgggaaattggataggagtggcaggtaatatgcaacttacttttacctaacagctgtggatctaaatcttactcaaagtgccctatgtttacatattttactgtttttgtagctctaaggctgaggctggtccctactgtacctttgatgaaaggatggcacttttgtgggtgttagagtgcatagacacagtgcagcaccactgtgtgtggctgccccatattaatacctgtcatttctttatctgtctgcacccattttcagagttccttaggggcagccactatatcttttatctgtatcccagcatcttatacagtgattgacagtgatagttgaacaaatgaatgaaccaactcatatgtatgtttcctttgcatgtttatctttcccatcccttccaccttctgtgtctgtcagatcaaatgtcttccactggattttcatagaactttttctgtgtctctttcttattagattttaagagtttgaacttgaggttatctgcatgtcatagaaaacctaaaaagtagaggcttacatgacttaggggatttatttttcgtacatattgcaaagtccacagttaggaaattgctggctttgctttaccagtttaagggtgtgaggattgaagtcggttgttttaaaggtctttcccttttggtgtcaaatggttattgctctctggccatcacatgcactttcccccacaaaaaagatggaagtaccaaactggatgtgccggctgagtctgtcccttctttaaaggagctttataggaagtcccgctcaaaacccgtgcttgcatctcattgtgtggagtcatatcacaggactacctctatttgtaagagaggctgggaaatgtagtgtttttttttcttttgtttttatactgcacacattgttgctcccaacagaattgggattctgttagtaagggagatggggctaatgtttattggcttgatatctctgctatagggtataaactttgggacaagatacacattttatttatctttctatcatttatcaggtccattgtattggaggaggtcctcaacatacttgtgaacaaatgatcctcttttctcctcttatctttattcagaacatttaagaaatgacatagttgacatgtaagaacttttcctctttttgcttactctgagtggtctctgatgaaggaataacagaatacataggagaagttcatggcttagttgttggacacacgtattttttaaaaaatgggacttacatatattttctgctcttaagacctgcaatgaccatatttgaaatggaatctataaggaaaatatgtttttcattgttctgagattcatttctgtgatataataatcataagcctgatttaaaacctagatattttaaaataatttagacataaaacaaaagtggagtttatgatgattatcatggagggtcttaaccaattggaaaacaggttgaaggacagttaaactcattttataattaagcgtttagaaaataatattttgtttaattctaaaaaaatttaggtacagctgaaaaataccacctctcactaagatggaaatttaatgttttagatttcacttgaaaaaaaaatggagaatttgatataaccagtgaaaatctaaccaatgggaagagtcttacaaaacttgctggagattttttataggttggcgccattggatattatcagagggatattaacgctatcaaattctcattccaggatacaacctacacattctgcagcagtgtcttttttgtgtttctgtacacagaaactgtcgagaactacccagatataattaggttctcctgacccattctttactgtttctttgtgtgcatgtgtgctcgcacgctcaatgtagatgcattaagaaagaaactgacagaatcacatgatagaaagtgttttgggaaaaatacaaattaaaatggatgtcaaggatctctttaacaatatgttttagaagtcaacagctcatcctttgtgccaaccaacaatttgctttccagctcataaatttcgtttccattacaagaggaatcagataagcaagtttatggcaaaactaaaaagtttaatttggtgctttccttaagtacctgtcagtattttatgatagttactgaaggaaaagacttgttttacctcaaatgagaaaatggtttgagtcaacatattttgtagtatttcagtcatccatggttgaaacattgattaactcttttgatgcttttaccattttaatttgataacaaaggatttgatgtcattgatcaagtaaattttttaaaaggtaatttttaaaaatagggaatagaactggagtgtattcattgagcaaattctaagaaactttaaaaaattctcttctatctaggctgcaagctttttcttacttgtcatttcagatacttgtatatcgagaaatttgcaatataccaacttggtaatcggtaatgggtggcttgaggggtatacagcataattagaacttaaaactcagagtaatccagggcagatggtggcctgagtatgtattttcgatcccctcattgtcacactgcctaaataactttgaacaaccgtgggagcctttgtacctggtgttagaggggagcacatatgcagctgagactctgggtcttgggcagaagttgtgctgtatagatggggttgggggagtgatcttatctgtattccttgtggtgatggagagaagagtccaggacctagaatctggagagtcttagctctcccatagacctggggcagtgtcttgaaaacttatcagacccagtaatcctcttatataaaaagtgttttgcaacgtaccctttattatactgaagtgaaaatcttgaataatataatctatgcacacacataattaacaaatcaattagcacagtgctctgaatgtgattaatataaggaaaaaaagaaaaaattgttaatgcaatacgtatttcaaaatacaaatgcttaggcacaaatatactagaagacctaatcaaatggcctgtatacagaattacagtgacagtgagagtaatgaatgcagtctgatatgtgtgtagccttaacagcttaaatgccaagaatagcattggtgatctagtgatgcacctttccagaatggatgatgactcttgctaaagttcttaatgacacaaagtatgttcttccttccattttcacagaggttggattcctgaaactgtacaagaaatacttaaaataagtcctcacttaatgtcaatgataagttcttggaaactataattgaaacgatgtatagagagatgagtttttttttttctaagcaatgttataaagaaactgtcgaatgaaacaattttattccaggagctactatatgtaaaatggagataggttctaaggagatattataaatatattttttacgtatatgcatgttaagtggggctttcagaactcatgcaggtcgtgtggaattctctgtacagcatagatctgtgtagcggaagacatctagcacctctgacttcggcctgcttaatggcagttgcacccccccaattagtattatatccaaaaagatttggatttaaccacttactgattaaaatttctatatggcctgaagcacacaaaacaagataaaagaaaaacaggagaatatggatgtgaaggtatatatgacattatgtttataagtttaaataaatactattaaagagctccttacattaggcaacataattagaaaatatccaaagggcataaacaggcaatttatgaaagaggatgtgcaaataaaaatggaaagattttcattcttaccagtgctcagggaaatacagaccaagtgagatattggtttttgcccactagattttttttttttcccagtaggcccagtgctcctgagagtatggggaactgttgtttactctgatacatttctggtagaagtttgaattgctataatcttctgtggaagttgttttttgataggtataaaatttaaaaatatatctgccccttgatttagcagtcctgtgttttatgaccctctcctacagacatgaaatacctgtttgctaggataggaacataaagttatttattgcatgattatttataatgcaaaaagtgttataacaaatcttatgccgtcttaggtattcttctttatgggcacatattaatacattttacagcagctgatcctggaatctacttacatagatttgcccggctgagaagcaacttgagggctgatcgcccgctgcattccaaagaatcctttttttttttttttttgacttattagtgattatgatgacattaccttttattgaactgtttcaaaatacatgaaaccatgctctgatgacatttttgaagtgtctggattctgtttgccactgtttaaagatttaactagttctttctttaattaatatttagctcttctagtatcatcttaccactggaacagcatgtaccatttgcctcatctttccatttcagggctggtcaaaagagacaaatttcagacattaactaactgaacattctttactataatagatttggaacttttatctaaaacaaatgtctatgttctctggccactgtgttaaatatgtatggtgtgtctcttccatttggcagcaaatatccattgcatttgattcagttttcactgcccttgaaataaatatacttgtcctgaatggcaggcttaaggattttccaaagtaaatgatgtttgcaccacatctggccagccatttttatgtgatacattaaagagagtcagtgttcattaatttgacaaatatttcttgaatgcctactatgtgttacaggctttggcaattcaaagattaatgacacagtcactgctcttaggagatgacagtttagcaaaaagggcagagtcttagccagataattataatacagtgagggaagtgtggtaatgcttctttgttgacaatgatacctgaatgggtgcgaatgtacctcagtttttaaaatcctgggtctttttcaagtctatactcatcctgggtctctgtatcttattttacaccccccttccctcaacaataagcaaactttgctatctgaggtaacaagaaatcttgaggaagggcagctccgactttattaattcagttgttcaaagatactatcaaagaccctaggcactaagtacttcgtattttttccttattttttctcttctgccacgttcaatgtgatggcttggtcttcagtgaagttaaaaagttactttcataaggtggctgcctgggttttggggaccatgtgtagaggaacaatttctttcctgtgtgtacttttctggggtaaattttaaatcattttagactaatagcaaaattgtaaaaatagtacactgaatttttgtatactcattacctagatttaacaaatgctaatattttaccatattattttacttttttggtgtatgtgattttcatggctaaaattttaaaacaaaagggtgtgcaatggaaacttcattacagctctgatgttagccaccttatgccctttaccataatgtatacaaatgactatgtcaatacctttcctccctttctcctttgtctctctttcgcttcttctctctcctccctttgtgtttttccctccccctctctttcttccctccctgcctcccttccttcctccaattgtgtatcctggaataattccatatggatatatacaaaggttcctcattctttatagattcatagaatatttgtttgttctcttatttatggatttttagtgttccagtttatgtgcatgaaattttattaaccagtcacctctcgacttttttggtaataattggcattataaatactgcttagaagaatgtttttttaagtatttatttatatttttagagatggagtctctgtctgttgcccaagctggagtggagtggctatttacaggtgcagccatagcatattgcagccttgaaatcctgggctaaagccatctttctgcctcagcctcctgagtagctgggactacaggcatgtgctactgcgccagcttataaacatgttttgactggaaaccttagttgttgactatgtagagtatgtaaacagtttttaacttgtgtcttgaaataataacataattactgaaaagttacaaaaatagtgcaaagacttcccatggacctttcacccagcttcctttaatgtttaaatattttacatagccatgatgcagtgatcaaaccagagaattaatattgatacagacttaattcacattttgtcttttttccagttcaggatccagtttaggattctccattgcatttagttgtcattcactgtcacctccaatctggaacagatcctcatttttttcttcttcttttatgacattgacgctgttgaagaatacttgtcagttgtgttatagaacattggtcagtttgcatttgcttgatatttcttcatggttagattcagatgctatgcattttatcaagaatataggagtggtcgatattgcacttgagattgacaaatatcagtgtgtcataccaagaagattcaggctgttgatatatctctgtaccagttaactttaacatctagtaaccaggtgtaaactttatttaaggtggtagctgtcagttttctccactgtaaagttactgtcttcttctttggaattaatagatattttgggattctttggtactgtgcacatatcctatttctcatcatgctctcaccattataattttagcatcccttggttattcttacctgtaacaatcaatacaattgtattatcaagtggtgatttttctctttccatcatgtcttctccacttattaatttgaatttttgagtgtaaagaagagctacagaatgagtctcttttctctcatttatttatgtattcaattatttatatcagtgtagcctcatggttctttattttttgagacataatccgtaactatcattatcacccatgttgttctggacttggccaatggaaatgtcttcaggttgtctcctttatctttttgttgttgtcgtttgttttcttattgagtgaggattttaatgacaagctatggaactcagcttatactaatgagaatggtacaaggcttgactttccctccgcgcatcttaaccatttttaaatgcagagttcagcagtattaactccattcacactgttacccagtgctcctgtatccttttaatatgcttctgttttgagcacttccttatttcccggcaccataagttcaggcttatcgtgtactttccttgcctcaagtcctggtttgagtcatttcttgaagaagccctggttcctttcactggtgaactgtgtgaagaaaccgcaatctgggcactagatatgctcattgctactaggatgtcattgcttccaggcactcttagtagacttaaatctactaagacttaggaaatgtatgtatttacacaaacacctataactatttctacttatctgtatatgtattaaaaaaacacgaggttgtactcttccctttgattttacttcaactggataggatttgattttagcatctcccttttcttataagtaactctgctctttaacagtgaaaaacagaaagtctcatagtctacaatatatttacattatttgttcaatcctattaatcatatacagtggtttcagaattactaacccatctctgtgaaaaagaaattttactaacacaaatataatatttatgtttagtcctttttgtgaagttcacttgggttagttctttcctttgccactcaaatcaaattctgtttttaatttgtaatacaattagattaatttgttaccacttgtattccattgtggattctccccacttcctggatggttttaattttttgagtttgtgaaatatgagcatggccctcaaagtcagaatgatattaaatcttttactcagagaatgatcactgcccactcgtcctttttgccatccccattactccattctttccatcttgagcccacccgtctcccattagcttttgacttctccttccatttatttatttattttttgtacaaacaggcagaagtcagcagtgatttttcgtattttgatcatgccttctacatttgttaattggaatttcactgtaaggaagagtggtctcttattccccatttattcaattatttatgtcagtgtagactctgattatttattctgtaggtcataatgtcatagaataaatatacagaattctctgtatgaaacccatggaaatttttaaatttccttttgttttttacttaaatgatagcatactatagatactattttactttttgtaatgtaacctgggaactctgcatcagttgatagaaatcttcgtcattctttcttatggctgcttagttttccatgcagtgagtgtatagtggtttattcaactactttcccatgtgtgggtgttgaggttgtctgatatttcacaattccaaactgtgtggcagtgagtgaacttttgcttattgatttttatattattggaggtatatctttgggatgaatttctagagtgcagactgctggattgaaaggtaggtacgattatagatactgcctagttaccctccaaaagggttgtaacactttatatccttaccaccaagtgtgaaaattgtgtgttccttgcaacccctcaaatggaattttattgttgtcattctttataattttcaccattcagtagggaagaaatggtatttcagggttttcatttttcatttctgtaattgtgagtgggtttgagcatcttttatagtttggccatttagatatacttttgtcaatcattcatgtctcttattgtttatctattgtctctcaatttgtgtgagtttttctgtttgtctgtggcatatgtcacaggcatattctccccttttgtctgctgtccttttactttgttgtgcagaatattttattctttgccattaaatttatgaatctttttcaagttcttttggattttgagtcatggctaagttatcacctttgtgtaaaaagaggctaaagagacatttacttttttctagtacttgtcacttacatagtgacatttatatctccaatccttttggagtttattcttatctacggtgtgaagtatgaatctacttttttctttgtgtaacctaattgttctagagctctttttatctctagaaatgttctagtgctcttttattttttttaaatctctaaattttttttagtgatggggtctcgttatattgctcaagctggattgcagtggctgttcacaggtgcaataatggcttactacagccttgagatcatggaccaacatgattctcctgcctctgcctccctagtagctgggactctaggcacacaccaccacacctggtgcttacactagcactatttactaaaaatttagtctttaccaccagtgttttgggatgccatttttgtcaaaacgaatttccaaatttacgtaggtctattttgggctttctgttctgctccacggttctgtttatttgtattccatctacgctgtttgcaaaggaagttttatttatattatagtttgacatctgctagggctagtcctttcttgtagtctgtctcccttcccttccctctccctctccctctccttctgcctctccctctctttctctttctctctctctctttctttccttcctttctttcttcctttctttcttttctttctctttctttctttctttctttctttctttttctttttctttctttctctctctctctctctccctctccctctccctctccgtctctttctctctctgtctctctctctctctttcctttctttcttttctttcttttttgagaatctcactctgtcacccaggctgtagtgcagtggtgcaatcttgactcactgcaacctccacctcccagattcaagcgattcatgtgcctcagcctcccgagtagctgggattactattagccaccatgcctggctaatttctgtatttttaatagagacaggatttcaccatattggccaggtggctggtctcgaactcctggcctcaagtgatctgcccacctgggcctcccgcagtgctgggattacaggtgtgagctaccgtgtctggcctagtttttctttttaaagtgtttttctgagtattctttcatgtgaattttttcaaattaactttagtatcatctgtgtaactccatgaaaaattgacttggtatttgtattggtaaattagaaattaatttttttcttttgagacagagtttcactctgttgcccaggctggactgcaatggcacgatcttggctcactgcagcctctgccccccgggttcaagtgattctcctgcctcagcctcccgagtagctgggattacaggcgcgagctaccatgcccagctaatttttgtgtttttaatggagatggggtttcaccatgttggccaggctggtcttgaactcctgacctcaagtgatccacccgccttggcctcccagagtgctgggattacaggcctgagccacagcgcctggctggaaattaatttttaataaattaatttagggagaactgatagttttaggaggtgaagtccttctgtttaagaatagatgatggcttcacatttattcagctctacttctgtgtcttttagcagtgtcttcatgttttcccagtgtaggctttggatatacagatgtcattccagatctgtgggggattggtccaggattccccaaagataccaagatctgccattgctcaagtgcctgatattaaatgggcgtagtacttgcacataacctatgcatattctcctgtatactttaaatcatctctggattacttgtaatccctaatagtataaatgctagataatacttgttttagtgtattgcttagggaataatgaaaatgaaaagatctgtacatgtttagtacggacacagttgttttcccctgagtatttttgatccatggttggttgaatccatggatacagaacacatgtgatatggtctggctctgtgtccccacccaaatctgatcttgtaactcccataattcccatgtgttgtgggaggaacccagtgggagatgattgagtcatgggggtgggtctttaccctgctgttctcatgatagtgcatgagtctcatgagatctgatggttttaaaaaacaggagttgccctgaacaagctctcttttttcctgccgtcatccatttaagatgtgacttactcctccttaccgtccgccatgactgtgaggtctccccagccacatggaactgtaagtccaataaacctctttcttttgtaaattgcccagtcttgggtatgtctttatcagcagtgtgaaaacagactaatacacgatggatacagataccttgttgtagttattcctttatgttttatgttctttgttgcctttgtaaatatttttttttctgcctttcatagaggatttctctctcattttgacctctaactggttattacttgtatatataaaggctattattcctatatgttcattttatattgtcttactgaacttttttatagtttgagttaatttttatcattcatttttttctagaattatttatggtactctcatttcatttggaaacaagagttttaattctttgctttcaaattcttattctgttatttcttttgtctaatagcagtttcttttgtccagtttgtcttttgtctaattacagtgttgagcagtagtggagatagtggataatcttggcttgttccttgtgttagtggaattgactttagtacgtcccccattaagtaagatactggcttttgcactatatctattttgtcatgttaagaaactatccatacatttctatttttttagagttttttctttttaaaaaatggatacgcagtaaccatacatatttatggagtacatatagatattttagtacatgcatacaatgtgtaatgatcaaatcaggataattagtttattcatcacctcaaacatttatcatttctttgggttgggaacattaaaaatcctctcttctagctattttaaaatatacaatagattagtgttagctatagtcaccctactgtgctgtagaacactagaacttattcctcctgtctaactctgcagcctctttctatcttcttttcccctgctccttcctagcctctggtaaccatgattctactcttcttccattagatcaacttatttagctctcacacatgagtgagaagatgcagcatttgtctttctgtgcctggattatttcacttaacataatgttctccagactcatccatgtatgcctaattgctctgattaggacttcctcttagagttttatcaggtgtgagtggggagttttgttgaaagcatttcagaagattgatggagtgattatttttcctcttacatctattaatatgacatatagtgttagtagattttctaatattgaatttacctcgtgtttctggagtaaatttcatatggttttttttttaaattgttgtattcttggcaaaaaataataaaatattatcatttggggtccatttgtgatatttgtctgtagttatatttttttgaactgtctttttctactttgggcatcagtgttatacttgcttcatttaaagaattagaacatttttattcattttcagcactctggaacaattcacagataattggaactatctggtttttgaagacttagaatttccctgagaacacatctggtccttttgcttttttgtgggatggttcctatataaatttctgtatatgttctttagaaattggtctgtttaagctttctatctctaattggggcaattttggtaatctgtatttctgtatgaaattacccatatcatcttggttttaaatatacagtcatgcgttgcattttcagtcagtgatggactgcatatatgatggtggtttcataagattataatggagctgaaaaattgttatcacctggttatatcatagcaattgtaatgttgtcacacaatgcattactgaagtgtttccggtgttgctggtgtaaacaaacctactgtgctgccaattgtgtaaaagtatagcacgtacaatcgtgtacatacataatacttgatgatgataacaaatgactattttactggtttatgcacttaatatgctaaacttttattattattttagagtgaactgtttctactgattaaaaaaaaaaagttaactgtaaaacagcctcaggcaggtacttcaggagggattccagaggaagtcattgttatcacaggaaatcacagctccaagtgtattattgcccctgaaagtcttctagtggagcaagatgtggaggtggaagacagggatagtgatgatcctgaccctgttcagacctaggctaatgtgtgtgtttgtgtcttcattcttaagaaaaatgttcaaaaggtaaattaaacgttttttaaataaaaaaaggttatggaataaagataaaataaaatatttttgtacacctgaacaatttgtgttttaaggtaatcgttattatgagtcaaaacgttaaaaagaaaaagtttacaaagtaaaaaagttatagtaagctgtttagtttattattgaaatatataatttttaataattttagtgtagtctaaatgtacagtgtttattgtacattttagtgttatgtcctaggccttcacattcactcaacactcacccactgactcacgcagagcaacttttagtcctgcaaactccgttcttggtaagtgccctagacaggtgtaccattttaaaaaagtcggccggcacaatggctcatgcctgtaatcccaacactttgggaggccgatgcgtgcgggtcatgaggtcaggagatcgagaccatcctggctaacatggtgaaaccccatctctactaaaaatacaaaaagttagccaggtgtggtggcaggcgcctgtggtcccagctactcaggaggctgagacaggagaatggtatgaacccgggaggtggagcttgcagtgacccaagattgcgccactgcactccagcctgggtgacagagcgagactctgtcttaaataaataaataaataaataaataaataaataaataaaataaaataaaataaaaaagtcttttatgctgtatttttgtatgtttggatatacaatacttactactgtgttacagttatccacagcatctagtgtagtaacatgctgtatgggtttgtagcctaggagcaatagtctgcaacatataatggcctaggtatatagtaggttataccatctaggtttgtgtaagtacacttgaggaatgatgaaattgcctaatgacgtatttcttggaaagtatctccatcattaagtgacacatgactgtatttgcatagaagtctgcaaaagtgacctcttatgactttaaaataatttcttctgtttttattattatttatgccttgttttttatttgataattttttttgtgtgtgtgtgtgatagagtcttgctctgttgcccaagctggagtgcagtggcgcgattttggctcactgcaacctctgcctcccaggttcaagcgattctcctgcctcagcctccctagtagttgggattacagacacctgccaccaggcctggctaatttttgtattattagtagagatgggctttcacctgttgtcccggctggtcttgaactcccggcctcaggtgatccacctgcctcagcctctcaaagtgttgggattacaggcgtgagccatcgtgcctggctaaatttgttttgttttgtttgtttactttgcttttttcatttttcaacgaaggctttatttttttttagatggagttttactcttgtcgcccaggctggagtgcaatggcacgatcttgcctcattgctgcctccacctcccaggttcaagcgattctcctgcgtcagcctccctagtagctgggattacagtcataccccacaccagggtaatttttgtatttttagtagagacagagtttctccatgttggctagcctggtctcaaactcctgacctcaggtgatctgcccacttcggcctcccaaagtgctgggattacaggtgtgagcccccatgcatggcgagagctaagtctctaatttatcttttattcttgcatttttactgctaagttttagtaatatgaatttttctctgtttactgttttaaatcctagagatgctgatgcatagtgtgctcaatatcactagtttttagaaatcttctaatttaggtttttatttctcctttcacccaaaagctgcttaaatttttttatttctaattttattgcaatgtgatcagagttatttttaatttttctgctttaaagagcttcctgatgtcctttatttgtgatttatcattttgtgaatgttcaatgggtgcttgaaaagaaggtgtattctcttctctgttattaggtagtaacactgaatctagattaagatctgtgttgttttttttttttgactctatttaagtctttgtactatcattgcttgagtcttgtatggagaatgtataggtctgttattgtgaatgcatttcttcttgcagcctcaggttggttttatgttatttggtgcataggtatctatagatgttctaattttattgtcagttgtgtctctaaagtgttcttcttgggctgggcatggaaaaaacaaaagtgcttttcttttcatatttattcaattttggcttggattattctttgtatgttactcctttgtctctttttaattttagtcattctgaattatttagctttaggcatgtttctggtatgtggaatagaattgggtgttgctttgtgaaccacatttaaaatctttttcttttaataggtgagttaagcttctttacagtcagtaaggcttcacttaatgtcctggatagattcttggaaacacagttttaagtgaaatgaattactatatgttgtaggaacttaactcttgctcatatcaattaacctatggtaaattgtttctttatactacagttgtttcgcttaaacttgtggtttccaagaacctattgatggcattaagtgaggacttactgtttgatgtgactacattgtttggtctctgctctgttgtgatgttttaaaattatatatattattttttatttactatgtttctttgtgacatgtgtttttttctttaaataaataaagtgttatttaggaagttgcatattttgagtggttaacttttcatttataacttctaaatgcctgtagtttcattgcctatgtttttgtttttgtttttgagacagggtcttcctcatacccagtctggagtgcagtgtcatgaggcatggttgtagttcattgtaacctgaaactcctgggctcaagggatcttcccacttcagcctccctagtatctatgactacgggagtgtgtcaccacacatggctagatttatttattgattgattgattgtaaagactgggtctcactatgttgccaaggctggcctcaaactcctggcctcaagcaaccctcctcctgccctggcctcccaaagtgttgggattataggcatgagccactgtatccggtttccattgcctgtttaaacatttaccatctactttgtcagtgttcaatagtatccttttattcctgacttttgccaaccaaagaatgtgttttactttctgattttctcaccctacacatttttctgcattatttctatttattataacatttgtacattgacctacttttttcctacttttgtgcattgctacaatgcatagcatttgtacattcatctttggcttttgacaattaatattcccccctgtattttagttttagatctacagttatgtagcaatgagctcattatcagtccttttgctgaaatttccccagacctctcttggttgcatgaagctcatcctgttttatttagattcttcaagaggggattatggattcttgtgtgttaaaaactttttatatagccttgaaacttgaaggataccttggttgtttttaaaattcattattcatacttttattgaatttctaaaaaatgcttttccattgttgcattatattttgttttagacaactctgatgccagttgaatttatttgccttcgttcattattttatcttttatgcctagtagccttggacactttttctttgtttttgaagcctaagggtttattaggatgtgtcttggagttgactgttccaagtaaattctcccaggtactggttgacccttttaatatgcagattcaagttttcttgaattacaatcttaaatattgtttctatttatttttatttcttttttaaaatttttttgctgggactctagttttatcaacgttatttttttcttttttgctttctgattccatcactttctctttgacttttaattttttttaatttttatttttttctgagacaagctcttgctctgttgcccaggttgaagtgtagtggcgtaatcttggtttactacagcctccacctcccaggtcaagtgtttcttgtgcctcagcctcctgaatagctaggattacaggtgcccaccaccatgcctggctaatttttgtgtttttagtagagacggggttttgccatgttggccaggctggtctcgaactcctggcctcaagtgatctgcatgcttcagcctcccaaagtcctgggattccaggcgtgagccaccacacccggtctaattttgttgagttttaaaataatttttatttagaattttatgtaggtgtttttaaacatatgacattatatttgaaatttcttacaaatatttagtaaaggaaggaaaactaaagaagaatttcctgacaataaagcgctgttagcaatgtttgattccttacattcggtgctcaaaccattactattctaggactggtcctttttaaggatggttgaaactaggacagattgtcacttgtctggaattgttctttctataagcaagactttattaatactgaatgttatctccctctgtctctgtctgtgattctcttgaaagtgcttcattctgactgaaggaaaacttttgctttctgcatggagctttgtatagaaacccggcacgacagggcactttcgggtcatgccttgagtcttaagaaatattgaaaaatataatctaacaatgatgcttctgttcagcaaggcaaggaatttataacagggcaaaactgaaacctgtttcttgtttgctagcccataaggaggcagcttgtttttatcatcagtttcctgacatcaggatgtgacttcgagaagaggaaaataacacttattggcatcaaagatactaaagtatttaatgccttaaatgaataatcagtatatgtgaacaatgaaaacacagatgaggaaggatacccagtttcagtttcatctgttgtatcatgttagttggagatatttagcttaagcctcttccctgttggtccactttaccctagttgtttcactgttgtgaatgcatttacaattattttaaaagatggcctcattctgtaggtgaatccctgtaaagaacattgtagaaggttattataacaactcctaagcataagctggagtctaaaatgtttctaggcagcaacagtcatatgtatgcttgacctttgggagatctggttctttcctgttgcttgtttttaccctggcactgtcacccacttgtgcccaggctagtttcaaccactgtttgcctgagcctacattttgtgtttttttccattttagcatgttttacaaatttattgaattacactttgtaccaggtattgtgttagggggcaggtataaaagcagagttctcatctgttatttgataggaaagacagtgtgactgttatcagtttacttattctcagcctgcagcccagccttgtttgccttgccttgggtgacataactggactctgtaatagctgttctttgtcagctgctataatgttagtagatggtcttggtggggaattgcaaagtggtggcagcaggaaagcacttgtcttctgggttccagttttcctccatttttaattcactccagaagcgagagatgggtgcatggaaggcctggtggagctcataggatagtatcgatactgcctcctttcccatgacattacagactgtcttagtttgctcaggctgctcttacaaaataccatagagcaggtgggttataaacgacagaaatttaattctcacaatactggaggctgggaattccaagaataagacgccagcagatttgatgtctagtgagaactcacttcatggttcatagatggcaagttatagctgtgtcctcacacagtggaaggggcaaggcagctagctttatggggtctcatttataagggcactatctcattaatgagggtcccaccctcatgacctaatcacctctcaggagctccatgtcctaatatcacattggtgattatattgtagcatatgaatttgggggggacacaagcattcagacagtaacacaggccatctccctcaagaaaccctggttctagctgtaatagtctgtacttatctgatctgccgttccttctctgcctagatgacatttattaaaatatcttttattatctaacagcacttccctcttgcagtcttccttaaacatcagcctgtattagtctgttctcacactgctataaagacatacctgagactggataatttatggtgaaacgaggtttaattgacccagggttccacagctggtataggaagcatggctggagaggccttaggaaacttacaatcatggcagaaggtgaagaggaagcaggcacaatcttcacatggcagggcaggaggagatgggagtgctacacacttttaaacaatgagatctcgtgataactctatcaggagaacagcaagggggatgtctgcccccatgattcgatcacctcccatcaggcccctcctccaacaacgggaattacaatttgacatgagattttggtggggacacagagtcaaatcatatcacaacccaagttagatttcccaacttgaattcctttaaagcatctgagatttactatagctgtgctattctattagactgcattataatttttagttggcttgtgtttttccttctgaactgtgagctctttttaatttcaatatcactagtgctaagtaacataacctctcagatgcttactgaattgatttaaatcttctatttactttttccttccacttaaaatagtagctcttttctttttctttcttttttttttttttttttagagacagggtcttgctatgttgcctaggcaggagtgcagtgactttcacaggtgcaagcatagcaccctgtagccttgaactcctgggctcaagaagtcctccagcctcagcctcctgagtagctggaactacaggtgcacacactgtgcctgtcttatattttattgagtaatgtgttaggtacttttatatactttgtctagtttaatcccactggagcttaggaaacaagtttagaggagttaagtatcttgcccccatgtttatatagctaggaagttaacatagttcattttaaaacctgggtcattcctgctcctatttatcttctcaaatattcagaagatgttaaaaagtaaccaggtttttggaagatagctattttgtttcttatttttattgtgttaatatagatccattagagtaccagagtaattcagcatttggtttaaaagtcttggctttacttatattgagagattcattagcagaaaattacttattgatagtgtcttatcctcttcaaaatcggaattaacaaaatgattcttttatttctctcacagtgattttttaaaatagattttattttttagagcaggtttagattcacagcaaaattgagaggaaggtacagagatgttccatatatcccctgcccccacatatctgcagcctctcccatgatcagtatcccccatcagaatggtacatttgttacaactgatgaacctacgttgacacatcattatcaatcacccagagaatgtagtttacattaaagttgacttttggtatggtattttctatggattttgacaaatgaataatgacatgtatccaccattattgtatcatacagagtaatttcactgcccttaaaatctttgccctgcttattcatcccaaactcttagcatccactgatgttttgattgtctccactgttttatatttccccagatatcagatagtgggagtcatataatttgtagcttttttggatgggttcctttcacttagtaatatgcacttaagtttcctctatatcttttcgcgtcttgatggcccattttttagtgctgaataatatttcattgtcagaatgtacaacagtttatccattcacttactgaaggacatcttggttgtttctaagttttggcaattatgaataaagctgctttaggccaggtgtgttggctcatgcctgtaatccccgcactttgggaggccaaggtgggtgggtcgcttgaggtcaggagtttgagaccagcctggccaacatggcaaaaccctgtctctactaaaaatacaaaaattagctgggcgtggtggcatgtgcctgtattcccagctacttaggaggctgaggcatgagaatcacttgagtccaggaggcggaggttgcagtgagccaagatcgtgtcactgcactccagccttggtgtcagagtgagtctctgtctcaaacaaagaaaaaatgaataaagctgctataaacattgtgtgcagtttttatatggacataagttgtcaactcttctgggagggcaaaaggaaggtaattgctagatcttttgataagatatgtttagtttcagagtatgttcagattctgtcaaactgtcttccaagtgactgtatcattttgcatttgtatccacaatgaatgagagttcctgttgctccgcatccttgccaacatttggtgttagcagtgttctggatttggccattgtaagaggttcgtagtggtatctcattgctttaatttgcattttcctgatgacatatgatgtggagcatatttttatatgcttatttaccgtttgcatgtcttctttggagaggtgtctgtcaagggctttaccccattttttaatcagattgttttcttattgttgagttttaatatttcttcatgtattttggattatagatctttatcagacatatcttttgcaagtattttctttattgctttttattttcttgacaatatcttttgcagagcaaaattttataattttaatgaaatccagtttattgattcttgtgttcatggagtgtgccttttgtgtaatatctaaaaagtcattgtcaaacctaagggcatctagattttctcctatgttatctcccaggagttctgtagttttatgttttacattgaggtctgagccatttcgatctaatttttgtcaagaatgtaaggtctgtgtttagatttgtttttttagcatgtggatgtccagttgttctaccaccgttttttgaagatggtctttgtaccatcatattgctttcgctccttggtcaaagatccgatgattgtatttttgtgggtctatttctgggctctttgttctgttccattgatctgtttgtctgttctttcatcagtagtacattgtcttgattattgttgctttgcagaaagccttaaagttgagtagtgtcatccttctgactttattcttctcttttaatattatgttggctattctaggtcttttgccttgccatgtaagctttctaatcactttgttgatatccacaaaataacttgctgggattttgatagggattgcattgaatctatagatcaagttggaaagaactgacatttttacaatattgaggcttcctatcctaaatatggaatatctcttcatttatttagttctttgatttcattcattagagtttttttagttttttaaaaaattttattttatttttgctagaaccataggcacacaccatcacagtctgctagttcttaaaacgtttttatagagatgaggtctccctttgttgctcagtctgctcttgaacttctgagttcaagtgatcctctcaccttggcctcccaaagttctaggattacaggcatgagccatcaagcctggctcttgtagtttattttctatagatcatgtacctattttgttagggttattccttcattttgggaggtgctaatgtaaatggtattgttgtaaatttcaaattcctcttgttcattgctggtatttggaaaagcagttgacttttatatattaattatgtatcctgaaaccttgctaaatagcttatttgttttaaggttttttttttttttgccaatactcttgagtgttttatgcagacatttatttcatctgcgaacaaagacagttttgtttcttccttcccaatcaatatacctattatttctttttcttgtcttgtattaactaggacagggtccccaacccctgggccatgaactggtactggtctgtggcttgttaggaaccaggccgcatagcaggaggtgagcggtgggtgagtgagccaagcttcatctgtgtttacagctgctcccccttgcttgcattaccacctgagctccgcctcctgtcagatcaggggcagcattagattctcacaggagcacgaaccctattgggaactgtgcatgtgaggtatccaggttgcctgatgatctgtcactgtctcccatcacccccagatgggaccttgtagttgcaagaaaacaagctcagggctcgcactgattttatattatggtgagttgtgtaactatttcattatatattacaatgtaataatagaaataaagtgcacaataaatgtaatgcgcttgaatcattctgaaaccatctcccacccaatctgtggaaaaattacctttccctcgtgccaaaacggttgggggccactgaactaggacatccagtatgatattgaaaaggagtggtgaggggacatttttgtctttgttcgtgattttagtgggaaagcttcgagtttctcaccgttaagtatgatgttagctatagatttttgtagtctttttaactagttgaagttactctatatctcgttcactgagatcttttatcatgaatgggttttggattttgtcaagtgtgtctgtcaatagatgcagaaaaatctattgctatgattatgtgatttttcttctttagcctgttgatgtgatgaattacattaattgattttcaaatgttgaaccagccatgcaatcagaggtaaatcccagttagtcatggtgtataattctttttatacattgttatatttgattttctatggatgattttatatctatgttcatgataaatattggtcaatagttttcttgtgttgtctttgtgtggttttggtattaggataatgctgacctcagaatgagttaggaagtatttcctcttgattctaatttctgaaaaagttatggaaaattgtcataattaaaaaaaatatggtaacattcaccagtgaaccaatctgggcctggtgctttctgttttagaatgttgctaattattgattcaatttatttaatagatataggcctattcacatcgtctttttcttcttacatgagttttgtagattgtttttcaagatttggttcatttcatctgggttatgaaatttgtgatttgttagatcaatcagggataagaaaattaaaaagttattttacttttattcttttatcaatctttttttcttttctttgtttttcatattttattttattttgttttttgaggtggggtcttactctgtcacacaggctggagtgcatggtcacagctcactgcagcctcgacctcctaggcacgggtgatcctcctgagtaactgggactgtaggcactcaccaccacatgcagctaatttttctatttttggtagagaggggattttgccatgttgcccaggctggtcttgagctcctgggctcaagtgatctgtctgcctctgcctaccatagtgctaggattataggcatgagccaccttgccctgcttctttctctagatccaaatttctgacctacatcatttttatcctatgtaaaggatttttttttttaatttcttgcaaggtagatctactggcaaaaaaatctctcaatttttgtttgtttgagaaagtatttttccttcacttttgaagaatgattttgcgggttacagaattctatgttgttgttttttctttttttttatcaacactttattttactttaccactcgcttgtatggtttctagcagaagtaaaatgtaattcttatctttgcttctgtctagctaagggttattcccccctcaccccccacctctggcttctttcaggtttttttctttatctttgactttctgtagtttgcatatgtcatgcataggtatagtttttttggtttttatcctgcttggcattcacagtctcctgaatcttttgattggtatgtggcataaagttagggaaattttcagtgattactgctctgtatatttctgctgttcctttatcttctacttccgcttctagtattctatcacatgtatgttacaccttttgtaatcatctcattgttcttgaatattctgttgagaggtttctttcgttttttttttgtttttagtcttttttctttgtgcttttcagttttgtacatttctattgtgatatcttcaagctcagagagagtctttgctcagccatgtctagtctactagtaagcttgtctaagtcattcttcatttccgttagtgtttttgatttctcttatatgttttttgttctgttttagaatttctttttgtctgtttacattgcccttcttttcttacatgctgtccattttttccattggcacccatagcatgttaatcattgttgttttaaattcccagtctgataattcccacattctgccatatctgagtctggttctgattcttgctgtctcttcaaattgtctttgatgcttttagtacaccttgcacttttttcttgctatctagacacgaagtactgagaaacagaaactggtataaataggtcttcagtgatgtggtattaaggtgttgggggagagggagtgttctgtaatccactgattaggtctcagtcctttagtaagcctgtgcttactgtgatcctcacaagttcttcttagtcctctccccttcaggagggactagaaagctagacttggctggagctgggcatttgttttcacccaggtcatttaggctctggtgacaccccagcaggttaggctgtagttaactagtttttcctgagagcagactttaagaacagagtactctggtgagtttccatatagtttcttttacctttcccctactggaagcatgaggggattttgctccagtattcactgtgagaaccaggtcaagctcctggaggtaaaaattcacgcaagtatggggccccagtgactgagtcatcctggagtttttaactttactctaaaagttgtccacactgagcctccagcaatacataaattacagtttagattttcctaccctaacactcgttcccgtggaggtttgtggttttctgctcaggcaaattgtgatttttggtatctgccagttggtgtctccaatattaggggcagtgatttgcctggtgacctcaattctcttacatatctaaaaagaatgatttgttagtttgtttagttttttcacttgttggtaggatggaatagcaacttccaagcttctcagatgctgaactggaaacctgaagtccccacaaccatttttaggggcaaaactgtaatgttcatttcatgagtattatatataatttccacctagaggtaaatggtgtttttgttattactggttgttacttgttaaaggtttatgttgtggttttcaaagaaatttcatgtatctgtgctctaattttctttatggaaaaatggaccaaaaaaatagagaggtatttaattgcaatgaatgggtgccatttacccctccctgcaaaaagaacatttcagaatcattcagaattgaatgataagaaattctgtttttattgtataaggcttatggtggtcttagtgttacagaatagctaactttttgaaatttcattgtttgttaatccatggatttttaaaatcattttgcctcccaattatgaaaaataactttcacattgtagaccatttggaaaatacaatttaaaagtcacctgtatctccttgtgtaatggttaccatagttaacatgctagcatatgacttgccaatcttttttctgtattggattctcttttacttacatgaaattatatcgtacatatttttgtatcctactttttaaaaaacacatgtgtttaatgaggtaattttttaaatggctatgtaatatttcattttatggatatactataagttgtatatattttttggctgagtacttagattttatccaattttttattcagtagtataaatgtattataactgtcaaataaatgaacatctttgggtgtaagtctttaccttcttttttggtattgcattttaaaaaatgtagatctagttgatgaaggtggaattttcggtcacagaatgagcattttacgaactccagacatatttttcaacactgttctctagagaagagatatccattagccttactaccgcagtgtgtgagaatgagggagacacacccctgccacttgtgcttttagtatttccaattttagttttgctaatttaatggagattgggatgacagctcattgttttaatatattttctttgattataaacaaaatagaattttttttatatttttttgattatttactatttatattgtctttattatagacttcatgtttttcacgtatacttatatgagtttcttgtatattaagaattagctataagggaactgtggaagtcaagactactttaccatgttcataaaaactgataaaaaatgaatataactttcagatcttgagagcggattttacagatgtcatgtgagttcattgagtaatattcttatgtaccactactgactgcttgggactttattactgtaaataggaaaaacaaaaaattaagattctgatatgctaattattttgcttatatggtggtgaatatacttttaaaatgaaacatgtattgcatgcaacaatactattttggtagatttttagaaaagcaggtattattacaggtaataggcaataatgacttcgaaggtcttagggactatgagtaggtaaacactttatgaccacgaccccacaaacaccccgcaggagattatgtggctgccatttgtaaacggccattcattgtcctgtctcttgcctttggctctttccagtttttcttcccaaatctttggactagttcctgcagaaaatatgaattcacagtggtgccctctgggcctgggcatctctgggccggcagaccctgagcagcgactgctgctgagagcaggtgtgtgtacagatggcatggtggggccagcctgccttctgcttggtgatgttggagagggtgattgataatagagcttacaccgagtaatggtctgaggcaaggcgagcatgagtgcctggctaagtgaaagtcatcgctggcagagtggatatgtacacttaatttagtctgtagttttattaaacttccttattagaggaggccttattttcttattaaccagaggtctccatgctggctgtttcatcttgttgcctcctctcttaccgtgtatcctctcagggaggtgaggataattgagaaagggctaaaaacagctctcccgagtttgagaaggttttcagttgtcaatgcttacataatttagagaggactccaaagcattgtgaaagaaagctcattatgcgtctcagtctccttccttgtcttttcttgtagttgtctccatagtgggatgtacatatccctaggctagatttggagttgggtgagaagaaaatattaaaaacttcatttttatttcattcttttttatttcccattctttttcatttctattttatatatgttatgtaatatacacaaccaatttttctacagtaaagtatgtatataatttataagcaaatatacataaatttggtggtatgcacaaaagtttttaatttttaagttttcgcagtgtgcagtttaaaaattttgtagaacttttgtcttataggatttgttgtataggcatggcagcttttgcttaccctgaatactaagacattttgacatttacataagattactatctaccaattggagtgtttttctcccccctctgagtaaatcaggcttaatagagtacatatgaagggcataaagtcaagggcaattctcactatttctttgccaggattttaaactgaagttaaacatgtcaaaatgactaaagatttagagatgattggtagagaagtgttctcagtttgttactcaacctccaagttaatgtggaattttataactgttttagtcagctttctgttgggagctccaaacatcataaaatcttgtgaattctgcctactactaatcaataagtgaaatgatagtaattatctctggttttcttcatttttatatgctttgacaataatgtttaaaaccattctgggctttgatttgggattccacagaattttcttctgggtcacagagggggttaattatttctagaactctgaaattttgtgattcttgtggttcaaaatcacaaaaaccaaagtgaaatcatggtagaaagcttgatggtggggaatatcagctatggaaagtaacagtaattatcagttttgtactttttttctggaaaatattatcttttgaggcttcatttaatatttttctttatcagcccagaacattaaaaaaaaaccctaacctactggaaaaatttggtaagccagtgctttgagtggtcacaatgtagagaaaatgagcattgtcatgtagtaaagttaaaagacagttgtggccgggtgcggtggctcacacttgtaatcccagcactttgggaggccgaggtgggtggatcacgacgtgaggagatcgagaccatcctggctaacacggtgaaacccaatctctactaaaaaaaaatacaaaaaattagccgggcatggtggcaggtgccaatagtcccagctactcgggaggctgaggcaggagaatggcgtgaacctgggaggcagagcttgcagtgagccgaggttgcgccactgcactccagcctgggcaacaaagcgagactctgtctcaaaaaaaaaaaaaaaaaaaaaaaaaaaagacagttggggcttgcacatgagtaagggacaggatctcagctctctctgtggtgggtggttcttcacagtctaagaaggcctctcacttttttcttccatctttgtttccttttcaaatatttaatgtgtagaaatttttattgccctttctgcttagtcagaaatactaaccattgttgaaacttgtaaccatttctgataatttgcccagttgaaataagataattcttttattcaattccaggactctgaaatcctctgagaccaaacttatagaactgtcagttgtctggactttttgtgtgcattttatcaagagggagaagaacagttactttctcccttccctcaaaacagggcaaatgacagaattctatttccagatagatatgtttctttcagggacaaatgtcctatatttagttctttttagttaatatactttatattagccaatgcctagcactgcacacagcagcagccttgctttctcgcctatggctttctgaaagttgagaccacagaaatacttttgcctttccttgtcatgtcttatccacttaatgagaataactgaagtaatactaaaagctttcataagacctggttaaacttgaccttgagattgcttcactcagaaaagttcttagtttaattaacaagtaactgataggagtcatgcttggcatgggtcttcttgagaacttgccagctactttttttttttttttaagacaagatctctctgtgtcacccaagctggagtgcagtgacatgatcatggctcactgcaacctcgatctcccaggctcagaggatcctcccacttcagcctcccgaggagctgggaccactggcacacactaacacacccggctaactttgtgtgtgtgtgtgtgtgtatgtgtgtgtgtgtgtgtgtgtgtgtgtgtgtatgtaggtggttggtatagaagtgttctcagtttgttacttaacctccaagtttatgtggagttttataactatctttataaacaaacaaacaaacaaacaaacaagcaaacaaacaaacgtattttttgtagagacagggtttcactatgttgcccaggctggatctcaaactcctgggctcaagcagtcctcctgcctcggcctcccaaagtgctgagattacaggcatgagccactgtgcctggcccctgccagttacttttattaaagtcacagtgttctactctggatctagggagaccccctttggttccacagaaggagaagaatgggcatctctacctgtgcatcaggatgtcatttttttgagttgcgtagagaaggttctactcccacagcttgcatattgtccatgtctgtattaatcttgttatgaggcatcaactcagcatgggtaataggtagttacattaatgccagggctcaaggagtcccacccatttctttcaccaaatagcccacgaaagtgatgagagataggatgaccacatatataccgtaaacaccagaatgaaggcctttgtcactgctttccccctcagtgaaaaagtaggaaatgtttttaagtccctgctgttgtttgaatatttgattctccaaacctcatgttgaaatttggttcctaatgttggaggaggggccaaatggaggtgtttgggtcatggtcagtagctccctacagtcctcacagtaatgagtgggttcttgctgtcttagttctggagagagctagtggttaaaaacagcctggtacccccacatctctcttgccctgtgacccctgcacacactgactccccttccccttccaccatgagtgcagattctggtgccatgggccttgtacagcctgcagaactatgaaccaaacaaacctcttttctttataaactacccacattcaactattcctttatagtgacacagactgactgagacagtccctatttaatgcagtgctgctgcttttccagccagcaattctgaaagatgtagatctagtatacatattttaagactgtgtttttctgggaaaaacaagttgtctatggccttatgaactggattttctcatgcttctaaacaaactttagcgctgatgggagtatccagaattatttcctaaaaaatatctagggcttttggtccatcagccactgatagtttattatttgttggatgtctgccatatgtagcctctctttttgttacactcaggggaaggtctcaccatcaaaatcattctttaggactgcttaggttagagatccagctagatgctctggatggacatcattttctcatatcattttatcttttagagaaatacacatcattttctccagatatcaagttataacaggaagaagtgatatttatacattactagagagcttctgcttgttcatgtctggtaattcatttgcaccactagtttcttcatgcttggcatggatctgttcctgctacttccatcattcttttgttttattcctttttttctttggccaggcagatatactctggattgtcagccattctgcagaatgttgaaggcagccattctggtttttattgatttttttgttaattgtagtaaaatatacataatataaaatttaacattttatccatttttaccatttaatcattatttaagcgtatagttcagtgtcaataagtatattcacattgttatgtaaccattaccatgatttgtctgcagagttttttcattatccaaactaaaactctgtacccatgaaacagtaactccccattcctcctttcttccaatccctggtaacgacgattctactttctgcctctctgaatttgactgttccagattcctttatatcagtcgcctttctatttcactgatatttaaaaaatagatttgtaaaagccattgccacatttcttgaatgcatggcttaagttaccagttacatttgcatttcttctcttagctgttgtcccaaaggcattccacattggcctgctaggcataggagagcaaagcatggggagaccccagaaatatgagccctcatccttttaataaagactgattttaagaagtcgtctaaaaaccaagtcaactttcccaccacatttttatattgctcagtggcagttaccaaatagaatttcgtgttactgggcactcctaaggttccagggctccagagcttttagggttagactgtgaacttttgaagaaattaggtagctaagagcacctgaaaatatttagtgaaggaaatgaaatccattctttagaaaaaaattagaagttagcctaacagttagcaaagacaatttcctttggttgtgtaaaactagaatacagactttttattttgaatttctttttatctctgtccatgggtttatgcttggatttgcaacaaacaacaacaaaaaactgtttgtatttttaatagcttttaaaaagtattttaacaaaaatatttaaaattttaccaggtattgctaaaaattaattctttgtaagttgtgttaaattggaaggtagtatggtagaataagaatcacagcttgtaattatatagaatttgaagtaaagctgagtaaatctttcattaactttttacaagtagcctatgaccctgtttgctgctcatttctttccagctttccccagttaggacttgatgcaaacagtatgtgttgaagaatgttttgtatgacgtgttcggtagtcatttttcatcatgttcacttgtaatgaatttcagcattttccacattggctcacgaagattaaaaaaaatcctatgtgttgctttaccacatacttcactactgagtgataatctgacctttgggagcattgctggtcactatatagaatgatatttccttgttctatttcattcaaaatgaaaaaaatcattagagagatgcaaaaggaagaaaattggctgttcttttctagggctggatgtactggaaactacaagatgtcatgcaaaaactagtgtgaagatcctgtaaaacatgactgaaataaactgattttttaaaacaaactttattgagatgagcaaaccattagtatttctaggtaaaatggtttcaaattaaaaaatgcatagagcatcattgttggaaaataatggcttcttaaagttttggtttctgcttttggtgagatgtttgaaatgtcaaggaaattgtatctcctactagttaagattttatctgtttttgaaagataatgtgataataatgtgataatttagatcaaaagagaaggccactttttttgggaacatatacattgtataatttaagcaaaaacttaattaagaaaaaaatcattggtggacttgattttttcaggactctggttcttgattatttttgaggtacagaccattttaataatctgataaaagccatatacatcctgtccaccaaaaggaagcacattcataaacatggcaaaagttttcataccgtttcaattggatttctggaaggccacccatggatgcaaaattagaaaatgtttctgtagggactgtcatgaaatgacataggtaacttttgtcattcataatggttagtttctgccaaacaagtttcagacgagtgagctacttttctacaagactcaggccccattctgctacacaaagatgcctagtaatcattgctatctcctggtatgggtttctgatgagagtgtcctgggctttgtctttttgactgaagtaattgattgcccctagatctgaagtttgagttacgtgcatctcattctttatgcacaagtattttaaagtaactacagacattgtaacaggagataatttatatgctttatatcagtgaggcaccttgttttatacgcaaatccttttaattattttcctaccaatggtgggttttagtcagttttgtgatgttccaatgtattcacattgactttgtcttatggtaaggtttcctgtgtattgcagtgtgtctgtctgtaacatagtggctagtcaatgaattttggttgaatgaacattcaaaatccccactgaacaaaattttagacaacgttttgattttagaataatcttcaacttacagaaaagttgcaaaaaagttgcaaagaaacctcttacccagtttctcactgttgttaaataacatcctacattattatgctacatttctcacaaccaagaaattaacattggtacattcccgttaactcaatgccacattttattcagatttcactagttttcccctaaagtcctttttctgttccagtatttcatccagggtactatgttgcgcttatcatgtcttagtcttctctagtctgtgacagtttctcagattatctttgtttttgatccttggcagttttgggctggtcagctgttttgtagaatgcccctcagtttgggtttgtttgataattttctcatgttgagagttatggacttttgggggaaggccacggtggtgaagtgccattctcatcacagcatatcagggatacctactaaacaactttatttttaatatttcagtatcacaatggagagacgggaagagtaagaaggtaaaatttaaaggagtcagtcttgtcatggtaaaaattgtggtaaagataaggtgagggaactgaatctaaaagaatcatttatatttatctgggggaattcagcccttggtgttcctgtcagtgactcactttgggtgtttaagagttggtagaatttattctatttaaatgatacaaatcagaccaatgaaaaggtcagtggttcatagatacacatcaaggcagaatttacaatgataagttttaaaaactctcttgtataaccatttttttaaagtcagaaaattcttaattgtatttttccccttttcctctgtttctatatatttttcttgacctgtgttcttttgcattaggatttatgtttttcaagtccagttaaggatattgagcaatatgtcaaaacatttgtcacctgaatggtttatcccttaataaatggcgaggtggttttgcagacaggtgacacactttaatgtattacagagaccagacttgttagttattgattcgtgatgaataaattactgccattctaatcataagaaaatttcttttggggataattaatcagattcatgtgcttcttaagcagtgtagcattatcatcttttttagttacaagaatgaacctgtctgcctctgcccttggtaaatttagggcagaggcagacaggtttctaggtttgtattttgatctttatttttattaagcagatgagaagcatactcgcttaaaaattacttcaaactgcctttcctgttgagtaggttttgaactacctgcttgacagatggtgttagaagtaattactgaaatcatgtgtttacctgctcatggacatgtgttcaccagatgcaccctgtttacccagggctgctgatttcttaaagaaatatgcaccttctggatagagttgcataacttaggagaataaaagctcgtcaagccggagctctcaatctctgcatggcagaatcagctgtagcgagaagaccatttacatttcttaatgagtggtcaatttagatcacagaaccatgtacagcattatttacctttcttcttttgatttacttagtagtttaattttacctgtctactgagttatttaacagatagcctcccaaattgttgactaaattgtagcagtagtgactaaccagtcttttaagatgatggtgttttggtttattatgttatttttgaaaacatgtttttcagaagacatattaaaaatgtacccatccctccccgtttctaaattctgattgtggaggtccggcttttggattaggcattttttttttttaacacctcatgagtaattcttatgttcattaagatggagagtagttactttaatattttatttactaactatcaaaactgaatttattttttccaccttgcttctgttttattctgttttttaaaaagttaaactgatgagccaggcatggtggcacatgcctgtaatcccagctactcaggaggctgaggcaggagaatcacttgaacctgggagccggaggttgcggtgagctgagattgcaccattgcactccagcctgggcaacaagagtgaaactccatctcaaaaaaaaaaaaaaaaataaataaaagttaaactgaatgatagtgactcccctaacatgtgtgccttaaatgttcaattttgaaaaggagtacatttaactctctataaacctagagaaacaaggaaagtcattgtttcaggattttgacaggtgcaaaactgtaaataattacaggcctgggcagaaactagaacagaagttgcacagcagctggcaggcctgacctgtgacaggtctgacctgagttaagtagcctaaatttcatggcaagctcagatttgttttatggtatgaaattcaccttctgctacagaaagattctactgattgaggctagatatttgccaaaaagggagtaacatacagaatattgagaaagaaaactgcccactgagccacctcttgtatgacttcaggaccagatggaactagtgtagatgcattttaaaatcaatttacatttggactgaaataaatcactcaacaccaaatggtatacagtggttatagctgaggagggtggtctggaggtttttgggtttttttttttttttacactttttatgtaatctgtttctaaaacattttaatttttagacttaggagcatatctgactttagtgaagaggaaagcagttttaatttaatatcttgcgaatacctgaattgtatttttcaaggtctttgtagagaataatacaaaatttcgatgagattttatcaccttcaggttccattaagcagttctccaccttaggacaccagatttgttcctggtccataaagaagccggctagcagcttccatccccacatgctgtgttgcgaccctggaaagctgcagtttagaaaggatagggttctgatgacttatgggctcaatctcacctatacatgaagttgtttttttttttttttttggcttgcccagtgtcttgaaaatttgacaatttcacattttaaaaaatctgtgtttctagctttcttggaaaaaccgatgaatggcagtgctgggcctgcactgtactattgctggaaccaagtagtagctctctgcttttagactctctgatttgctccagtccttatcattccctgttgtactttcatgtctattaccttcctgtagatacatgagttaatgacccctcgagtagaggatatgtgcctcagaagtggagacatgcagagagaagacagctttcaggaggatgcttgtggaacctttatacagttaggcttggtgtgcccatgtcttctgccccctcccactctgtctaaggtttttccctttttttctacgtaatacctcaattttccccttcaccattagggaaattatacctaccagaactttgagttatgttcccccagccacccttagtaaatatcctatgtacctggtgtgtaggagttttgtgaatgtttactagatctttaatctacccatttgtatgtgtagtttaatcatctagtttttcttcttgtttttagtagaaatcagctttcttgaaggataagagattgattagaaaaggaatggagacatttttaaaggtctgggcagattgagagttagggcagatcctgctgtgatgccgtggtgggagaggctgacagcaatgggatcctttctagcatggacaggaggaagcggaaagatgccagggattaaattttctcagaaaaggagaagaaatgatcctcttcttccttcttttcttccctactcctgtgctgtttggtgtttaaactcttagcactcagtgaaatgggaaaggttcccttgtccccctcgcagggcgtgtgatgtgtgtgtggctcacttcttcagtctcccactgctcgaacctctaggggagcatacagacgggcaggtcgtggggctctgaccccatggcagtgtctaagggtggatgcttacagctcctgaagccccagtaggcgtgtgttacagggtgcttttttagtctttccgtctataggcttgtgttaaccagctgaattagaccctctcccttgtcacaaggacagagggctttctgtatcccggattcttgccttggtgtaccggaagaatcagatcacacctgggcttggggaatgagtgcaaggtttaattgagtggaagtagctttcagcagatgggggagccagaagggagatggttttcttgtggattgggccttccaactgctcaggcaaaacttgtcgttccgccagtcgatggccggctggcctgctggcctgctggtgtctgttgtgtgcccctctggacgtcctctcgatatccagccacctgtgttttcttcgccgatgtgttcctcatgatgtccagccacttgtgtgttggcctgctagggtctcggggtttttataggcacacgatggggtgtggccggccagggtggtcttgggaaatgtaacatttggatgtgaaggcaggagtgcctgtcctcacctaggtctgtgggggtggagccctagccaggggccacgcccttctctacccagcacttcccttcaccacttctttatcatttgaagggaccacgctcttcccttcccagcactcccgtatcactagggtctgtggcagaaataggatttccctttgcttctaattgggtatagagagaagtgaagagctgagtttcatttgtctaagaatctcacaacttactgtaatatggtttccattagaatatgtgttgcaaatatagtgaaacttaaaaacaaaacctccattgtaagttgacttttggcacgtagcttcctcatagcttgggttgttcttggctttgttaaataaagttaaaataaagaaagtggtgtagactggggcttggcaaacaatggccctcaggacaaatctagcctgttgcctgtttttataaataaagttttatcggaacagagttgctctagttaattaaggtactgtttgtgactgcattcacaatattagtgtagagttgagtagttacgatagagactatatggctcacaaaatctaaaatatttattatctggcactttacataaacaattttgctgacctttggtgtagatggttaatatccaaaaaacaaaaaggaaaaaaaaacccaactcttttatgtgctctaatgtatttgctgttgaaaacaaagggaatttgtgattcatttaaaaaatatatatatagctatttgatgattttgaagatattttatagttattgttccatttgaatgaagtaaaaatgttatgatgtcttagggtacaattgagctataattttagtatgtcaatgactacagcttttttctagggaaggttataatagttaacaggaaaatatgacataaatagtaaaaacatgatataatagtaaaaattagtaaaaaatttttgttttgggctgtaagtttttttggagaggagactgtagtaagtgtaaaaacatgatgttatataattagttttacacatattttcaggaatatttttaatacacaaatgtgtggatatagtctattttggtgtgaatttaaactttgaaaactgctaaaagtttcagttacttgagaaatagtgaatttttatttaatgatcaaattaaacactaataaaattatgtctttattgttttcagttttgagagcatttgaaaagtgcaggcctgtgttggggatttcattcaacacaattattgattgtttcaggtattaagcactgtttgaggctctgggatttcagtactgaataaaacaaaatacttaatgagcttatgtgggtagggagagaaacaaacaaacattccttgactcaatttttttatcaaattacaccaagtgcttttttaagacctggggatcgataatagcaatgaaggaagcaaattttctgctgtcatgtagcttaaagaaaggtaacatgtaagtctggtagcaactgttaggaagaaaatgaaagcaaggcattgagagagaagaggggtgtaattttttgtagcgtagtcaaggaagacttctctggtaaaatgatttgagcagggacctgaatgaaataaggtaatgagtaatgggaatatttgagaaaagaacattctagacagaggaaacagcaataaaaaaaacactgggggaggaatgtgcttgtcatgttcaagaaacagcaaggagaggcaagtgtggctggaatagaaagtgccagagggagaatggtaggagatgagtttattttctacttaatgaatagctttgaatatgtatcagaggcaaagccacatgagaccaagctaaattctgtatgaggtgacagcagtataaaaccagaaaacaaggatatatggaagaggtccctagaccagaagtgaggaaataatagttaatttgctcattgtttctcaaattaaatcccacttctgtgaatctctttgtgatttactctttcaaaatggaattctagatggtatagtccagtgccccgaggcctgtgtaaattgttgaatttatggtgtgccaataccattatagggtggtcatctggttaatttgcaacaaagaatatgaggtttggaataaatgggtcagaaagcctgactaaaatgagaataacaattcacattcaattaaaaatgtgagtagcctgcaataatttcttattgtacttgggtaaaggggagaatagaagtagaatgataattaatagttgtaaatttaaaagtcagcttttttgcaagtgttaatttttcctggaagtgttgtacaaaatgatcaagttcctgtaattgcagaaacactgatcatggtatttataattgcaaggcatgcgaggtagctgaccttaagtgtaaactaattaacgtaggatttgtgtgatatgctttagcaaaagtagatatttgaaaataactgactttttttcattgtacaaatgacaatatttgtggcattttatttgtttaatattactgagcacaattttcactgtgattcttttcattttaaagcaagtatcaataaatgaaattttgtttctggcataataagattattacttaagcttgttcacaaaatattttataaagaacagcatcaatcacaactattatttagctactgtttgtggaagagtacaggcttttgacactcagcagttagtaataattatttaaataccatataaagacaagacaaattaaatgtataccattcagacattcggagatctcaccaggaaagacccccatgtataaacaactgggcctaagaagctcttttgcaaagacttggtggaattcaggacacatttttactcaggagaaccatatatagggtattcacttcacaggcaaatgcaaaatgtatcaggaagctgtatacatttcatggattttagaggagtctagtactagtttttagcagatctaactttatagaaaagcttatagctttccctttccttggtgtatatatatcagtagcacagccattctcgaatctgtttaggattactcttctgtttgctacctgtgtcacttgtcctgtgtggtgggtctggtagtatgtgttcatagcggggttgctttatgagtaggtccactggtgaggcagttattgacattgcagtcactcttccaagggcagcagcagaccgtctccatgggtgctgtgcttatgattttcagccacagaaagccaaggtgatgatgagggccgtccttgaccacgcatttggtccacacttcacaggacaataggagaggtggggaaggccaggcacagcagactgggacaggcaggccctctctatggaaagccctatggtgctacccatcaagattcctttgccttcattctgctgctgtatccagagatacccatgcctctcactagccttgcctggtatggggaggcaaacctgtttggggctggattttggctgtagggttgtgtgaaatagggtgaaatagaagaaggggaagaaaaaatctctcagtctaacttcttttctttactttaggcttcccgccaaccctttggtgaatttgaaagtagtgatcagatgctcatatgctgatccaactagcctagtttccacccttacattttgagtaaactactacaatccagactttaatggcactggacacacctttctcctcactaccattttagatttataacattttacttttatttactcaagccaaagtactcatttaaggtgtcctctaactttacaactagggagatggaataccatcaaatatataactacacttaaatatatctgtgtctatctgtatttgtgtgtatcatttaaatatctgttatacaaggtcataaataatccaggagtacagcatctgtttcacctgctgctctctttatgatgtgaagtgatgagtcacatgagtaattgtattacttgtataaagtacttggaagacagtttaacttgcataagtcctgtgctgtgtgtcataaagatgaaaagtttgagccatctgttacttaaaaaaaaaattaccccagtgtaccacctggtgtttaactaggccttgggatttgttccagatacagcactgcttcattgaacaaatattgggggtgagggtgggtggggtttggtgattacttctgggacctgggagggacccttttcactgagtcctgaacaacgttatttagatcattgttatttcctattgtggtttgtctgtcattaaaaacaattttgtcttaattttgaaaattggatatgaggagttacattacacaaaacaacattatacaatgatggagataatgttctgtgcagcatgatttaatttggagcagtggatagccacctgctaggcctttgttcttgtggcagtctggcaagtggtcccagtgttttgggtctttccttggtcacgtggctgttgagatctgcctgggttagttgcaaaccattaatccagtagcacagaatgatgaaatatttgactactgggtgtttgaagtaagaaaacaaatccttttaaaagttattattcagcaaccacagaatgcttttatcatgttgatataacatctgagtctttacattttatctaagggtagcctattcttatctacaacataaaaaagaaatctaggtaatatttggcattatggtaactagctaccatatagcacctgtctgcttacccactgtggtggggtaaccatataattcagtgattaaactggaatacttttgtcagtgacagagagctaggacgaaaggtgtaaacaaggatatgtagtcattttacttacaaggcatagccatattttgccatcttccatgatcaagaataactgactattcctcatgcatgtaagagtaattcttattttcaaattgcattaattgtgctggtatagtgcctcatataaagtaggtactcaataaatatttgtaaattgaataaatgtttatgcttaaagaaatcttaaagcttcctgccaaaatctttaaaaatgtacgttttagaagggctttgagttaaacatcctctgtattttcttgatattaagacccagtgtcaggattccccacagtggcattacccatggacctgtgatctaaactctgaaaccattttaatatgtagtatattataagagtaggaaaagcacttaattgcaattacgtattgttctgtctaaaataatttaactgtgtgctagaagagtgagccctttagtcaagtgcttatgacttatcttggtaacttatttactttacctttttacttgaagttgttaaacaattcagtggctacttaacatttccttaaatttactctgagagaaaataaggaacccaagtcatttaatttacttgtttgttagtaccttgtcagagactttaatagtacggaaagaaatttgggataatttttttcacgaattttcaatttttgtgttgttcactttagaaattttctttcatttaaagttttctctctccttgcaaggcctactttactatatatgacatagaaaagggtgcaggaatttctatccttttctatgtggtgattcttgcctgcctgggcagcttatgagacagattggatttagctcaaccctggaatgtgtgttacagtgtggtgggttttggcaagtcacttgtggtttagagggactctatgacgtgggctgggaactttggtcttttcttttggtttgaagtaggttttttaaaaaaggtgttagacagtttcaggttcgagaccttgttaattggtttaacatcccatctgtcctagtcactctgattctaatatgacagaattgaaacagatgctatttaaatctccatttctttattttattttagttttttgtatgtgtgcatgtgtctgatgatattgtagtcttggtctttctgtatctttccctttgacttttctacaatttctggtctggtttctttgtgtttcagcctttttcttcttgtccttatgttttttctttttgacttttttcacttgagtgacagagtttaccaagtcttattgtttatgtctaccctgatgtatcataatagtcaaacattggtcatgatagaacttgcttcagtacttcatgatttttatacagtagaactaaatccatgggaagatatttatttacttgttaattatcttcccattgcaatgtaagctccaagggcaggggttctcttttttttacgactgtatccccagagcctggaagtgtgctgagtgtctaacagctgttaaaaaaaaaatgaatagaaatgctttagttttctgagagtttcccaaattagatattatttagggagagtcttgaagttcctttgctctacagcacacccctgaaccttggctggtatttgaaccgtctaatgaagaacaaagtacttttgagagattctatttgtaatactgtaagattttttttttaatagattgagcatccctaacccaaaaatccaaaatctgaaatgctctaaaattcacaacattttgagcaccaatgtgatgctcaaaggaaatactcattggagcattttcaattttggattttccaattagggatgcaaaaaaaaaatttgaagtctgaacacttccacttccaagcatttcagataagggatcctcaacctgtagtctcttccctttctagtgctcattgtccctagactcgattttactactttatcagttaagatgcttgttggtttcattaatagaaatctcagctgaaactcacttaacaataaggacgtggattatgttgcacaacaggaagtacaagaaggcttcagagtgggttaattgaactcattgttgtcataagagacctaggttgggtctttttatatttttcttttgctttcttggcttcatccttcaagctattattttctgtgattattaggacaagggcagcaattagatcaacattttccttgttgtatgtaatgggaaagaggctggcatttctttccttgaagacctgagtaagaatttctctatgtttttattgggccaaattggtctcagattattctctcccgagtattggcaaaggcaatggagttatagcgattagcttggagtaatcatcgagagtgaaatggatgttggaatcaactacaacacttgcagaaaatcccatatgaattaacctttataaataaatttctaaagactgttgatttcctgagcttcaagttaaaacttccctgagtaattaggtttataaccaagaggatgcagggtgaagtcaacattatgataattacttcattagggaaatcatggcatttaaataaaaaaagtaacaagtttcatcttcctaaatttagtaaatattacatgcaacattgtttgtagaaagtaggtacagtcatgtgtcccatgatcccgtgatgtttcagccattgagagccacatacacatctagctatgtttagaaacacaaatacttagctttgtgttatagttgcctacagtgtttagtacagtaacatgctgtatagatgtgtagcctaggagcaataggctacactatatagtctaggtgtgcagtaggctgtaccatctagatttgtgtacatacactctgtgatattcacacagtgatgaaattgcctaatgacacatttcttaaaatgtatccgcatcattaagtgacgaatgactgtatgtaaaaatcagttagaactgacttccctttaagtctgtttaaactgataacaatcagtaagtttgaattatttaaataaaatgaaatctgtggactagaaaagtggaggagataactaggacatagtgaagcttactttaaaaaatacagagtcaatataaaaggtaatgtgcatctgttaccttaatttactgagaagtttttgatttacttgaacatgcagtaatggattatttttgtttggccaagtattttcagtaaattttaataggcatttggaagcattatgatattatggagaaaatactgaatcaggaattggaatccaaatttctggttctggtcctacctattgacatgatttctagtaaaacattcaacctctgtaagccctcatttctttgtaaaatgcttcctttttaattttcttaaaatgtctatttcttttcattgattgtaaccactgctttcctgggaattgagcgacatatatcattcctctagaggtgtggctttttagtaggattaagattatatgtaattaagtttatttgaacaagaaggaacaggtaaaaagcaaataaaagttgtgagatagatatcagttctgtcctcggtgtatacagtgattgtagagaagagtatttctgttttgaaatatacatgttaattcattagaaaggaattattttgtaggtataaacacattacattttcccaatatttcgagtatgtcattagccaaatatgagattctaatgttgtctggcatttcgaatagtgtcagacttctacatttgtaaataaaagactgaagcatagattccttaatcacctgtaatatagtaaaaagagttttggacttagagtcagaagacaaattggaatcctggctcagctagtttagaaaaaaccttggtagcatggcggaatgataatatggatgctggagtcaaacagaggcaggaatgagttggatttcaccacttacattaatacattttgatgaaagaaagtttggatacctttggcctgtatgttgcagaaaacaaccagaagtagcatgaatcataagtgtgttatctcatagaacaggaagtctggaaattggtatttatgtgttaattccatggcttaatgatatcttctgcaacacaggagtatttaaacttttggttctgtcattcttagtttgtttgtggtatcttcgtttgagtggtgatattgctgtaatagcaatagttcaagatattacatgcagtcatgatgacagccagtaaagagaggaattcctcccatttgtctctttttagtaggtagaaaaccattctcaaaagctgtagtacacaccattgattcaaattatgtctcaaactcagactaaaagttactcactagcaaggataatgaagatgccatgactgacttagacttttttttttaaccccacctttggatttgggggtggggaggctctttcctgagcacagcccctcatagggtaaacaacaaacaaaatcggatctctgccaggaagcaaatggggtgtgtagggagaagaacctgagttggcaaacaaaagtgatgagctaatcatcttgagtagaggccagtaggagatgcacagaaaccaagagagagtggtaacagaatacaacagtctgtgctcggggcagtatgcagggtgctacaggagaatgtatgagaaaacctgaatccaaagttgcaatggtcaggaaagacttttctggaggaaatgacagcttagttatcacctaagggattagtggaaaccagacaggaattagtcatgagcagcatacccttcttctgtatctataagagcacaaaacttagccatgatggtgtttcaggactattttaaggaaagttttaggacaaatgttggcttcaatacctaatcagtgtgcttgatgtgttagaaaaaaaaaaaagaagtgaaatgaaaagaaaagaaaatttaaaaaaagaaaagaaaaaaacacctaatcagaggtaagcaccattatctgtatgtataacaactaatgttcaaaatgattgttgtttttcaagaaaaagttatataacttttttttttgagatggagtctcactctgtcgcccatgctggagcgcaatggcacaatctcggctcactgcaacctccacctcctgggatcaagtcgttctcctgcctcagcctctgaagtagctgggattacaggcacccgccaccatgcccagctaagtttttgtatttttagtagagggtttcaccatgttggccaggctggtcttgaactcctgacctcgtgatccacctgcctcaccctcccaaagtgctgggattacaggcctgagccatcatgcctggcctatataactttaaaaatgctgtatattacagtatgaaacactctcttttaatctttgtaagattctaagattcaaaggacttgtgatcatgtagttcttacttctgtgaaaagcaatcattacttacttgatgcctgtaatgagaagtgtttattagaacaaaaactaggatgactttaattatttcaagaagcacaggtaagagactttaccctctgatgttaatgcaaagcatatacctggaatcgacattctgccatatctttacttgcatcctttaaagctgtttcttaagttttgattgaattaattaatttagaaaagagcttacactaacaagggtttttttcttctaatgaatcaggagtgagtttgcatgttttgctctccactgccatttttatatgttttgtttctctttaaataatactcgtatcttaattatttaaaaatgataccacatcctaagagtacatgatgtaaatcattcttagttcctaatacttactctccactctccaaagacatagacatcatattaggagactgatattcttttttcatattacttggataattcattgccccatatattcatggagaataattgcaaggcaaaccaacagatatttcaggtaacccagaaaaaggatatggtaagcacatttgcaaagaaatacttgatgaactagaattcatacactgtacaatgaaaataaagatttttatgatcgattttgacttaaaatttttcttttttttcttgttaaaaacaaaacaacatctaagctcaagaaatataatacttaacaattgacatagaaaagtcagacaagttctttatttatagagctttctaaataccttatcacaagttaccacaagataaatgtgtatgaaaaattagagccacctacctgttttggtttttgtaaaaatcaaatgtgagacatatactttattcactctattaaaatacatcagtgatgctaactttgatcatatttggacttttaaacaaactattttatccttaaaaaaagaaaacataaatgcaagcaaaatgatttcttatgacactttttaaaaatgaaaaatgcttttgtcaagatagacttatacttaagaaataaagaaaaagcaggatctatcgaccaggatgaaagatgttcttttttttatcataataacatgaagggcaaattaccaccagcttatgggcaagaagtaaataaaaacaaagtactatgatacaaaaaattctcataatgttcagttgatccagaagataatagtctaaggctattagctatgctagtctcttatttttaatattaaaatattttttattaaattttttgcatgttaagtgtttgtcgtaatcaatgatgtcccaaattcaatgcttttgttaatattaatgatactattgtctgttcttttttttttttttttttttttttttttgagacagaatctcactctgtcacccagactggagtgtagtggtacaatcatagttcactgcagccttgatttcccaggctcaagtgatcctcccacttcagcctcccaagtagctgacactacaggtgcgcacccaccatgcctggctaaattttttattatttgtagagactgggtcttccaatgttgtccaaactgtattattgtctattcttgttcactagcctgagccattcacctgatatgggtgacattttttcttttttcactgaaatgaaaattggcagacttttgctgcttctttattacccaatgttaactaatgttttccagtctagaattttaacttaactaatattttaaacttgtatattaaaataaaacacttggcatacataagagtttatagagtataacctctacatctgaagaattagggatacttctgaaggtgaggaaatcactttgcatcatgctatgaatttgttaaactgtttttattttgtgactagcagccttgttttatttaaaaaataaattttattgtataaatttaagatacgtgatcagacacatatatagtaaaaatattattatagtggaacaaattaagatcatcatcttacaattattcatttttccctgcctgtggcaagagcagttataatctactcatttagcaaaaattctgaatataatacaacattattaactatagtccttatgttatacattgcatctttcaacttgttcatcctgttgtgtttgctgctttgtatcctttgacctacatctccctattttctcccacttctgccagaatcactgttttatcctttatgtattatatttgccaaccctccccccacctttttaaaaaagattccagatttaagtgagatgatgcaatatttttctttctgtgtctggcttattttacatagcctaatatccttcaggcccatccatgacgggatcttctccttcttaaagactgaataatagtctgttgtatgtattcaccacatttactctatccatttgtctgtccatagacacttaagttgtttccatttcttggctattgtgaataatgctgcaatgaacatggaagtgcagagatcttttatgaagtggtgatttcatctttttggggtatatgcccagaaggtagattgctgggtcatatggtagttctatttttaatttctgtgggcacctccgtactgttttccatagtggtttgtaccaatctacattccttccaacagtgcacaagggttctctttccaccacgctttcatcaatgcttgttatcttttgtctttttgataacagctatgtaggatattctgaaaatatatttaaaatattcttatttttcctagtcagtatttcctgacttttctcctctaggttgcatgtattgctttagtaataaacaaaagcattaatgaaaacttcgttttgaaaaaattggatctgggatagaatttaccattttgttgtgggtttattttctgatatggatttattttactatttcacttgtaattttagtttttctcaacttaggtaagaagacgaatgagaaggtgagagacagctagtgcgtgctcatgggatatgacatttgaagggaaaaggatttgatagaatctcaggcatttgataaagagttatttggcacttgcagtaagctaagcactgttctggtttggtgcacactgtgatgaataagagagtttctcagccttgtggggattggggagataggaactaactaaatattttcaaaataaaaacaggatttcaggtttgataggcttgataataagcatgcagcataaagtaaaaaggagtgatgaggtcaaatggggcctattttatataatatggtcagggaaaccatttgaaagaggtgatatttgaacagagacttgaatgctgtggcagagcagaagtttgtgaagagctggggaatgagattttttaaaattatcctgctgttggacagaaagtacagcaagagatgatgtggcttggatgagtgtggtgccagtggagatgagaagggcttggatttgaattctgtcttgaaggtagccttggaggtagattgtgcaaatgaaaagaagagagcaatcgggtaactgcttgtttcattttgttttggtttggttgggtctgggttgagtactgggcatatgttggtaccatttatctgagatgagaaagaacagaagaggagtttttctgtttgttttgtttggggtgggatgggtgtgggaatgagaagtcaagaagaatttgttggtttgtatacttgatttgaggcatttactagatacctgagttgatatgttatatgtatgaggctggagtttggcatataaatttgggaatcatgtgctgtagatggtgtgtaaatccatgggactgcagaagatcacccagagaatgtgggaaggcagagaagagagaaccaaggactaagaatgtgctcaggaggttgaggagcactgatcagtagaggtggaggaagtcgggggaagtgttttagtgaagcatgtttccagaaggaggagtgatcagctgtgtaagtgttgctgagaaattgagttagatgaagactgaagattgacttactggatttgtcaatagggaactggtggttgttctgatgagcagtttcagtggagaggtggacacacaagactgatttgagtgggttttaaacagaatgagagccaaggaagtgagataaagtacttattgcattttaggggaggtttgctataaagggaagcagaaatggagctagagcttggcaggggttgggaagatgtagaatcaagggagagtttttattttgtatttttaatacaaaatacatgcgtatatttatgctattgagtctgatccattatagaggaaaaaagctttgtagaagggaaaaggataatttacaggaccaaagtatgacagaaaggctaggatctagcacacaagcagaagcatcaggcttactggggagtgaggacagctgatctattgtaacaggtgggaaaactaatatgttgatacagaacaggtagtttgatagatatgatggtgtaatgaaacagcggttccttcttcttgtttctgttttctcagtgaagtcagaaggcaggtaatttgctgagacccttaatggggaaggccttattagagcaatataaaatattttattttaaaaatactactttataaatgtattcttcacttagctgttgctttttggttgttattgtggttagcaatatatgtctgaatatgttttctttaaacaggtagagttgagtttccctgggccacatagggcataagtcaggagccctcaccaccttttttgtatatggggaatttgaaatctagaaaccttgtgtttttttgccttctccctcttctggttctctaatttttcatcaggcacagtagagaaggagaaaggatggtttcatttagttcagtgtgctcattcagctgttctgcagcctccaggtcttgagagttgttgagcataatcccttgcacagtgaactgtcccaggcttgtgaaatcctagtggccactctaacacagatgactgagttgagatgttctttttgttcaggttttaaagtgaagtgccaccctttagcaggtagagattatatacatcattctgttttctttgaggactccaagtgcccctcttagctgtaagtagtagagaccaacgttaattcatctctcaatcttgtattccattttccagttcatttccctgaaccatattttcctcatttgtggagtaatacttcccactcatgggttcttcatcaggcagcttatgatgcatgtgaaaattgttctggaaaagcctaaacagtacaaaaagagaaatcctattgtcatggtgataattttgttattctctagaagacattgacagttccctaggaccaccccttaaactcttgtttttcatcttacagaggcatccatttcttgttttatttcttctgttaggggcttagtgtagtgacttgagtactgtttagggttttgatatatggagttcaaatttgcatactacaaactgggggtgaaagaaaagaagctgaatatattgcctgttttcaaatagtttattattcttctaactttttaaaaccacaagcttccctcttatcacatttttacaaatggatatatgaaagctggtagaaaaagcttgaatttaagatgataaaatgaaccttgttcttatgtttttctttgctaattttcaattctgctggagattagcatcttctattagcaaggtgtaaaaattgagtgcagattgcagcttttgggagagtgttcaaaaatatttttactttttttataattaaaaaaaacttcttactatttggaaaagaaaaaatgtctaatgacgtcatctactactgtggtatttcttcttaatcctacctctaggggcaaatatttcccatcacaataatagatttttagtcctggaagaaaccttagggttcatctttttaaaccattttcatgtaacttgtgagaaaatgaagactcagagaagaagatttgtctttctgtcagttcatggcagagtccgggttcaagttgaggtctctggacagtcagtgtgtagggttttccttcctgaaccatcctgccttttaaagtttacagttgtgttctcagaaagagaagagtgaagttacccagccacagtagaggaggaggatgggcagatgagttctgtgtacactttgtgcatttaatttgcctcagtcttctcaatggttttaactcattaccacaaaatatagaaaacaaacaggttctttgagttgtgctctctttgaaagctctttaatagtaattctgaattatttggtctttttagtgtcatcctagttacttctgataaggatggtcagaggaccaaatacagttttgtttctactaatacgagtgtacataggaatttttccagctaactgtgacatagtatttatatgccatgggttaaaaccactttcatgtgggttctgagatacataggaaggttgaaaagactttagagacagctaccatggttttatttctcttcttctttttgagggctgggaaatctcaggttatttaattttagagtatttttaattaaaatattttatgtttaacctctattgtaaaatacaataaaaaatttaaaaaccacacagaaatgtatagtttagcgaattaagtaagataccctgtagctcttaccactagctcaagaaatgaaacattgccagccactctggaaaacccttttatgttccccatgaaactcacagatctctctctacctcaacaagtaaccactctcctgacttttataatgcccacttctttatgtttccttatggctttttcccctgcttgtgcttagataataaagttaaatcttgctcattttaaaaagcctggtacgtattttaaatctttcttaatctacaggctcccctccatttctttctattccttacagtttacctgttgaagaacctgggccttttgacctgtagcctttccgtagtctggattttggtgattgcatattcaaaggtgacaagatcatggttctctgaggattggcttcctcatgggattggcttccttatggcatagggaagttactggtcttcttgatgtggttttgggccctgtggtggctttaagtcatttggtggcactgttctgctttcctggttgcaatgctaatggatacaggcccatatataggcattttttgtttgtctacctttttctttaaaaaaaaatttgcacaaatttgtggggtgcatgagaaatttagttacatgtgtgtaatgcatagtaaacaagtcagagtgtttagggtgtccaccacccacgtacagcacatgtttgttaactgtagccttcctactctgctatcaaatattgaatttattccttctgtgttcttaccctttaagccacctttcttcatcattccttctccccagtcacccttcccagcctctgttatctgtctttctttactctctacttcttttttgtagcccaggctagagtgcagtggtgtgatctcggctcacggcaacctttacctcctgggctcaagcaattctcctgcctcagcctccctatgattacaggcatacgccaccaggcctggctaatttttgtatttttagtagagacagggtttcaccatgttggccaggctggtctcaaactcctgacctcaagtgatctgcccacctctgcctcccaaagtgctagatttcaggcgtgagccctcgcactggcctctattctctacttctgtgtgatcacattttttaactcccacatgtaagtgaggatatgtgatatttgtctttttgtgcctgccttatttcacttgagataatgacctccagttccatccatattgctgcaaatgacattatttctttttgttctttttatgtatttatttatttttattatactttaagttctagggtacatgtgcacaacgtgcaggtttgttacatatgtatacgtgtgccatgttggtatgctgcacccgttaactggtcatttacattaggtatatctcctagtgctatcccacccccctccccctaccccacaacaggccccggtgtgtggtgttccccaccctgtgtccaagtgttctcattgttaaattcccacctataagtgagaacatgtggtgtttggttttctgtccttgagatagtttgctaagaatgatggtttgcagcttcatccatgtccctacaaaggacatgaactcatccttttttatggctgcatagtattccatggcttttatgtgccacattttttaaatcccgtctatcattgatggacatttgggttggttccaaggcaaatgacattatttcattctttttatggccaaatagtattccgttaggtatatataccacattttctttatccattgatggacacttaggttgattctatgtctttgctattgtaattagtgctacaataaatatgtaagtgcaggtagccctttaatatgttgatttcttttcctttgggtagatacccagtagtgggattgctggacaaatggtaatcttatttttagttttttgagcaatctccatactattttccatagtgtctgtactagtttacattcccaccaacagtgcgtaagcattccttcttctctgcaccctgaccaacttctgtttttttttttttttttttttttttgagacagagtcttactctgtcacccaggctagagtgcaatggcatggtatcagctcactgcaacctccgcctcctgggttcaaacaattctcctgcctcagcctcccgagtagctgggactacaggcttgtgccaccacacctggctaatttttgcatttttagtagagatgggatttcactattttggccagactggtctcaaactcctgacctcatgatcctccccccttggcctcccaaaatgctgggattacaggcgtgagccaccgtgcctggcccgattttgttattttatgtagaactacttttatattgagagccatacttgtggcctcaacttacttgcaggttactctggaagccaactcctgtgaaggcaggggactcaaattatcatttttccatctttaattatgaaggtcagctttcatttgctgtgaaaacaacacggataatttgggaccataatacgttctgaaatagttcaagacaagcatgttaaaaatgagggtttttttttttccccactgaaccttccctcaagattttattgtcttcataataaaagatgatgcttagaactagttaatttggctctttctcttcttttctcctcccggttcaaaatgcttgcttctcttaataggcagcattctcttagatttgcaactgggctcaaagcactgaagcctcatcacagtcttctttttggcagtagcctttttacagaattccagaaaatgggtttagtatgcccaccatagccactctgcttcctgtcataatgctgcttaccctgggcacacatagaatccttgtagtagaggcaggaggcagagaaattgtagacagacaggggccggaccctggtgaaacctcaccatcaaaaacaaaaccaaaaaaacagcctgaaacccgcagcccaaagtgagaacttctgttcctgtttgcccactctcttctggttggttctttctgattaatgcctttttaccaattgaatgttgccttttccaaaactacctatgggctgccctgcccccatcctgtgcctataaagaccccagactcagttgggagagagaggagagagagacagacagccagacagccagcctgacatcggggtagagacaacctgactttggggaagatgacctgcgcttcccatcccctctccacctccactttctgctgagagctgttttcattgctcaataaaattttccatcttcaccatccttcagctatccatgtgacctcattcttcttggatgctggacaagagcttgggacccatcaactgcaggtacccagaaaggctgccacacaagccctttgccctttccagtggagggcagctgccccatgtgatgaggcaaggggccaactgagctgttaacccaccactgtccgtggacagtggaactaaaggagcactgtaacacccactctggggcttcagggtcgtgggcaccctcacctggatgccacctcaagggccagctgagctgctaacacacgctgtctgcggatggcagaactaaagaagcactgtatcaccccctctggggctttggggtcatgggcatcctcacctgggtgcagctgtgttccccttgaggcgacatgcctggtctggctgtgggccctgcgcggagcttgctcctgtgtcggcatctggagcaactggccaggtcctgcacttgctcgctcatgtgttccctccacaaggggttgagtgtggcaggccgagtagagggggcacccctgctgggagtccggcaaaggggccgacaaaaatcctgcattacttgctcttcttgcactgtgtcattttgtagggttggtgcttgccacacgcgttacagaaagtttgatggtttttaggaatgttcaccatgtttataggagtgctattggaacagaaagaaaaatgagtttttttaagtgtcctaaaatactgttagtctctgcctcttgcccctttagtggaactttttgattatgcagaattacaacttgctgaagcccagttgaggtagctttgaaggaagttcatttcttcttttgcctctgttcagaggttggggaattttgtgactatgtaaatttgctaaggagacaccattccagattcttatctttcccaggactcaagtggctcttgctttgccactgtttttgctgttgtttttgagacagggtcttactctgtcgctcaggctggagtgcagtggtatgatcttgactcagtgtaacctccgcctactgggtttaagtgattttcccacctcagcctcccgagtagctgggagtacaagcatgtgccaccacacctggatactttttttttgtattttttggtagagatggtgtttcaccatgttggccaggctggtctcgaactcctgacctcaagtgatctgcccgccttggcctcccaaagtgctgggattacaggcatgaaccaccacctccagccacttttgtattattttgaataacaaagggcatttttgttactccctgcaagggagtagcttttacattaataccttttctttttgaaaatggactttgataaaagatgtaaaaagactttgtaaaattttgtttgataaccttttatgaggttaaaacaaagtttaattctgattacatggccaattctaaatttgagaccaggtacagtggcttatacctgtaatcccagcactttgggaggccaaggaggacagatggcttgagtttaggagatccagaacagtgtaggcaacatggtgaaacccgtctctacttaaaaaagaaaaaaaaagctgagagtggaggtgcgtgcctgtagtcccagctactcaggaggctgagcctggggggcggaggttgcagtgagccaggatcatgaccctgcattccagcctgtctgaaacagtgagaccctgcctcaaacaaacaaacaaacaaattcatttggctgtgtcttccacctgaaatcagattgggatctcatagtactacagctctcatagcattcaggtagatggagctagaaataagcccaagtatgcattttccttcaggactttttaacactaagctagaaaatataagtatctcataaaccttatccctttaattaaatttttagtaggaaccagaatgtaaatttcttccttccctaccccagaatgtagatgcatgtcctcatttaattttagtcattcttggcgaatgtgataattagggtaaagtgcaatgagatttgcaaattggatggtgaattcactaaatgtaacagctgatcagggcttctcttctcagtgtcactttattaaggtcttcggatatactgatatattctggagtttcctccccacccccgcctttttcttttctctctttctccccttgttgaaagatactaacttctacagtgttggtgtgagtagagtatcaggatattgatcttaggggaggtgaactaattatagatttgttttttcattttatgagaggctattcttcataataggaatatagaatatatgccatatacttgaggttacttttgttaatccctttaagaatggagcactttaccttgcttaacaagaaggaaataattgattcagatgctgcatgctgtgcaaggtgagttttgaatgcagtgaggcgtatatgcagtggtctgacttccgtaagcctcactcatctgactttcctttggttcttaatgttacactgaagactagctgggcatggtggcttatgcctgtaatcccagcactgtgggaggctgaggcaggcggatcacctgaggtcaggagttcaagaccagcctgaccaacatggagaaaccctgtctctactaaaaatacaaaattagccgggcgtggtggcacatgcctgtaatcccagctatgcgggaggctgaggcaggagaatcacttgaatctgggagaccgaggttgcggtcagctgagatcatgccattgtgctgcagcctgggcaacaagagtgaaactccgtctaaaaaaaaaaaaaaaaaaaaagaaaaagttacactgaggactaaactctaaccttttttctctcttgcccaaattcttatctaagggatctagggtgtcacaccctacaaaccatataaatttcatcaggtgggttttatttaaccctatataatatgccttacttttcaacctgactctggcataatatcacataacagataagaaaaatcaaaatattttaccctaaaatacgtttttttttcttccatatcttaaaatggccctgcaaagccatcttttataggggggagtatttgcatctgagagtctatcaccttttaaaggtttggataggagacatttgccatttatttgtctctaagggtggccacctataagacctcatctgcagaataaccttggtctccacaaccccccagacagttctattgattccaggtcttagataataactcttttgaccaattgccaatcagaaaatcttggaatccagctatgacctgtgtgaccctccccccacctgttctccatatatcctacttttctgcaccaatccagtatatacctcacatgtactgactgatgccttttgtttccctaaaacatatacaatcaaactgtaaccaagcgaccttgggcagatgttctcaggacctcttgagactgtgcctggagccatggtcactcatattgagcgcattataaacttctttaaatattttagagttttactctttttgttgacaacacaaaaataccattgaaccttaaatttcatgttacagggaagtgacatcccaaagactcccaggatggctaaacagtagaaaggagaacttttattggtgatactggtttgtaagctgggaagaggaagtctccagcatagactgaaggtgctctctctttgaagaggaaaaggacagactgggttttatgcctcaccagttctgtattacacagtggagtcatatatattcagcaggtttgggggaaaagctacatatttatgaggagagctgagtacaagcacaatgagtaaacatttatgtaacatataccccatattcactttgtggtggggttttagcattaaaatgagatggaatttcactatctatatcaaaaggtgaacaaaagcacacaaagactttgtgcagcccctataaactagctgaaactggtttctggtctccagtagcttatcggaaaagaatgtttataaggcccatcatctgtctaatcaagtggcctgggttgtaaatcagttctgaaaatttgcctgatagctcctattgttaaggagttaaacaagagggtggttactcttatagccataggaatttagaaaaatgccatgccagccaggccctgaacccttgacccacaggtaactgtttccttaactttagggtctgtcttagttgattaaggggcatcattttgatcttgcaggtcacaggaggaaaaaagctcttccactaccctcttaggctcagtagctggggtctatgaatcaaaatgataaaggacagattaacaggaataaaaacatacatataactacatatggatatacagggtttaacaaatgaatgtgacttaaggacacagttagaatttggggcttatatcccatcttaacaaagggaatgaaatacagagaagagtcttgttagacaaagaagaaaaggtttggggcttcttgaggggggtaagttgtgggaaagggactaaaaagggtacagtaaataagggtcatttgtaaggttttttaaaatgcaaactagagtcttttcaggtgccaagagttgtcttcagagtagttctcttcctgatactggagagggagacacctttacaaatggaactttatgtgctgtttttagtaagatggggaaggacagggagatttttttctgtgtctgctttttcttaaatgctttcagctgaaaatagttcttatgctatagtggcatatttttggatggtatattcttgtccccttccatgaggaaatgagttttgaggtgactgataatactacaccagactttataagggccgtatttggacctgcaatgagttctgtcctatttgaactcagaacattaattttcttttgctgtttttcacttaaaaatattctaatttcaaggcagttttatagtgtgtgcaatatagtactgtagtactgcatgtatatattttatatgtagttgcatgtatttggggtacatgagagcttttctgttctttgcttttgttttcactggtgagtgccttcataaaatgtctagtggccactggtctgtgaacttatttgtgtttattaatgtacaaataatgtcctaaccttttatttaagtgttcatgtgtatttctgtataatttgtatatttcagtggagggtggtctttccaacttcatgtgtgttctttgaagcaaaaattcctcttggtatctgacaggtatctaagcttatattgtatgcacgataggcacaaaataaatattcattaatgaatttcaaaaatcatatataaaaggaagttgttgattttcatcgtttactccagaaatttttatggattcattacatagcagttagaaatggtgatggtagattgagtagataagttagaaattgacatattgagaagtaataggtgacacccacaaaagaaaaagaagagtgaatatgtatggcttat

SEQ ID NO: 2 - DNA, 297207 bp, Homo sapiens
gtaattttatatttctaactcaccctaccttatagttgtggaaagattcctctgaaacacttcccaaaatatcttttgctacaataaagaacaagtgtggctgggcactgtgactcatgcatgtaatcccagcactttgggaggccagggagggacgattgcttgagcccaggagagtttgagaccagcctgggcaaaatggcgatattcctgtctccacaaaaaattaaaaaattagccaggtgtggtggcgtgcacctgtagtcccagctactcggaggctgaggcagggggattgcctgagcctgggagtccgaggctgtcaatgagctacgatggtgctactgcactccagcctggaatgagaccccagctctaaaaaatacaaaaaaaaacagaaagaaaaggaaagaggctgggcgcggtggctcatgcctgaaatcccagcactttgggaggccgagacgggcggatcacgaggtcaggagatcgagaccatcctggctaacacgatgaaacgccgtctctactaaaaatacaaaaaaaattagccgtgcgtggtggcgggcgcctgtagtctcagctactcgggaggcggaggcaggagaatggcgtgaacccgggaggcagagcttgcagtgagccgagatcgcaccactgcactccagcctgggcgacagagtgagactccgtacccccgccaaaaaaaaaaaggaaaaagaacaagtgtgtctactctacagcagaaatagaaactttgaaaactatttttctaaatatgtggtagaagctttcacttggcattatcagtacatctaattttagctatgccagtctgcatggaatggtatctcattttgttttttaaaaaatacttttttcaccagcaaaggagacaaaataaaatcatgtaaaaaaactcaaaccaaaagaaaacatttaaaaacaataaaaacagatttaaaaaatagaaaataaatagtaaaataatcaatttatatcaaacaacttttccccagctttttagttgctacagaacatttctgtctgggcgcggtggcttacgcatgtaatcccagcactttgggaggccaaggcgggtggatcacctgaagtcaggagttccagaccagcctgaccaacatggagaaaccccgtctctactaaaaatacaaaattagccaggcatggtggtgcatgcctgtaatcccagctactcgggaggctgtggcaggagaatcacttgaacccgggaggctaaggttgcggtgagccgagatcgcaccattgcactccagcctcggcaacaagagtgaaactctgtctcaaaaaacaaaaaacaaaacaaacaaacaaaaaagaacatttccattgtaaagtttcctcaactcctttcatcctatgtcctggttccagattccaggcaatcactgatcttctctcattatagttttgcctttcattgtggctttactttgcatttccctgatagtcaatgaccttgaggattttttcataggcatattgaccgctgcctatatcttctttagtgaagcatctattctttaccagatttttattgttgtcttagaattctaagagtttcttatatgttcttatataagtcctttgtttgctttatgtattgcaaaaacatcttcccagttagcagcctgccttattttcttaatggtatcttttgaagagaagatatttttagcgaggtgcagtggcttacccctgttgtcccagttactctggaggctcgggtgggaggatcacttgaggccaggagtttgagaccagcttgggcaacatagtgagaccctgtgtgtatatataatatatataaatatatgtatatatatatatatatatatatatatatatatttttttttttttgagatggagtttctctcttgttgcctaggctggagtgcaatggcgccatctcggctcactgcaacttccgcctcctggattcaagtgattctcctgccttggcctcctgagttgctgggattacaggcgcccaccaccacgcccagctaatttttgttgtttttagtagagacggggttttgccatgttggccagggtggtctccatcgccgtgttggccagggtggtcttgaactcctgacctcaggtgatccacccgcctcggtctcccaaagtgctgggattacaggtgtgagccactatgcccggcctaaaaaatatgtatttttaaaaattagccaggtgtggcggtgtgcacctgtagttccagctactcaggaatgctgagctgcacctagctcttgagcccaggagtttgaggctgcagtgagctatgattgcaccactgcattccagcctgggtgacagagcaagaccatctctatttacaaacaaacaaacaacaaaaaacatataaaggagagaagacatttttaaaattaaaaaacttcaatttgtcaatcttttccaaaaagatttcccatttccttgtagtttcatagttttagtttttgtttaaatctgtagtactatttacttattttttgagacagtcttgctctgtcacccaggctggagtacaacctaggctcaagagatccacctcagcctctccagtaactgggacctcagacatgcgccaccacacctggctaattttttatagaggtggggtcacattatgttgcctaggctggctcaagcaatcctcccaccttagcctcccaaagtactgggattataggtgtgagtcactgcgcctggctgtagtcctttttgtgttaactttttttattatttattttccaataatttattatttggagatggagtctcgttctgttgcccaggctggagtgcaatggagtgatcttggctcactgtaatctctgcctcctgggtttaagcgattttcctgcctcagacttcccacatagctgagattacaggtgtgcgccaccacgcctggctactttttttttgagatggagtctcgctctgtcgcccaggctggagtcagtggcacaatctcggctcactgcaacctccgcctcccaggttcaagtgattctcctgcctcagcctcccgagtagctgggactataggtgcgtaccaccatacctggctaattttttttgtatttttggtagcgacggggtttcaccatgttggccaggctggtctcaaactcctgacctcaggtgattcacccgccttggcctcccaaagtgctaggattatagacgtgagccactaagcctggccctttttgtgttaattttatatatactatgaagtaagggttaaggttaaattgtttacccaaaggacatccagttatttatttatttatttactgtgacagagtctcactctgttgcccaggatggagtgcagtggcacaatctcagctcactgcaacctccacctccctggttcaagcgattctcctgcctcagcctctcgagtcgctgggattacaagtgcccccaccacacctggctaatttttgtattttttagtagagatggggttttgccatgttggccaggctggtctcaaactcctgacttcaggtgatctgcccgcatcggcctcccaaagtgctgggattacaggcgtgagccaccgcgcccagcccatccagttattcttgaatgatttgttgaaagactatttttcattcattgaattaccatgacacttttgtcaaaaacaactgaaaccaatgtgtggatctatttctagactctcaattctatttcctttatctacatgcctttccttaggggaataccacactgtcttgattactacagttttctataagctttgctatcaggatggataactttgtccttttttttcaaaattaacttagctattcaggattcttttcatgtccatgtacattttatttatttttgagacagggtcttgctctgtcgcccaggctagggtgcagtggtacgatcatggctcactgtagccttgacctcctgggctcaagcgattctcccacctcagcctcccaagtagatgggactacaagcacacacgaccacacctggctaatttttgtattttttgtagagatggggtttcaccatgttgcccaggctggtctgaaactcctggactcaagcaattcaaccaccttagcctcccagtgttgagattacaggcatgagtcaatgtgcccagttgattttatttttgagacagggtctcggtctgtcgtccaggctagagtgcagtggtgtgatcatagctcactttaaccctgaattcctgggctcaagggatcctcctgcctcagcctcccaattagctaggactacaggtttgcaccaccaggcctggctaaattttatttttttgtagtgatggcagtgggggtctcgctatgttgcccaggctggtctcaaattcctggcttcaagtgatcctcccaccttggcctctcaaaatgctaggattaaaggcatgagccactgagcctggcatatcttattacattacagtatcataggacctcagttacgatcccaagacaagtgagaaataaatatttttcctcctgtccatcaccttccaatccataaatgtgagcaaacatcctcttagatctttaaatttttctcttagcaatgctttgaagttttcagtgtacaggtttcacacatttttagaaatttacccctaaattccttatattttgatgtgatcaaaaattctattttaattttgttgctagtatatagacaattgaattgttaatgttgagttatatcctgcaccttgttcattgttattagtggtaggatttttagtattctctacgtatgtgatcatgtagtccgtgaacagttttacttcatcctttccaatgtttatgccttactacttgaagagaagtggtatcttggtgcagatctaagggggaaagtgttcaatattttatcattaaatgttacctgtaggccgggcgtggtggctgacgcctgtaatcccggcactttgggaggctgaggtggggtggatcacctgaggtcaggagttcgagcccagccaggccaacatggtgaaaccccatctccactaaaaatacaaaaattagccgggcgtggtggcagatgcttataatcccggcgactcgggaggctgaggcaggagaatcgcttgaacctgggaggtggaggttgcagtgagccaatattgtgccactgcactccagcctgggcgataaaatgagactccatctcaaaaaaaggaaagaaaaaaagttacctgtagatgttttgtaaattccctttattacgttgagaaagttaccttgtactctttaagcttttatcatgaactttctaaaatacttactgtatctattgaaataatccataatgtgttttatttctgttaccataataacaataattgattttttcttttcttttttttttttctgagactaagtcttgctctgtcgcctaggctggagtacagtggcgtgatctcagctcactgcaacctccacctcccgggttcaagcgattctcctgcctcagcctcctgagtacctgggatttctggtgtgtgccatcatgtccagctagtttttgaatttttagtagagacagggttttaccatgttggccaggctggtctcaaactcctgacctcaggtgatccgctggccttgacttcccaaagtgctggacaggtgtgagccaccggaccctgcctgattttttttttttttttttttttgagatggagtcttgctctgtcatccaggctggagtgcagtggcgccatcttggctcactgcaacctccgcctcccaggttcaagcaattctctcacctcagcctcccaagtagctgggattacaggcacacaccaccatgcccggctaatttttgttatttttttagtagagacagggtttcaccatgttggccaggttggtcttgaactcctgaccttgtgatccgcccacctcagcctcccaaagtgctgagactacaggcgtgagccaccgcacccagccctgattttcaaataatatagcaatcttgaattcctgggaaaattccacttggtcatcatgtaaggttgttataatatttgaaaatcaattatataaaaaattcatttttatatattgctggattcaaattgctaatattttgttaaagacttttggaattgtttttaagggcttggagctttcttttcttgaaatatctttgatttggtataggggtaatactagcctcgtgaagtgagttgggaagggcttccctgttttctaaagtgttatgtaagattggtataattccttccttaaatgttgaatagaattcattagtgaagtcatgtgggcctggaagtttctttatgggaagggtttcaattatgactcactttctttaacaggtaaggaaatattcaaatcttctatttcttttcatgtctcttttggcaatttgtgtctttcaaggaacgtgtccatctcatctaagttgtcagatttactggtatatagttgtctatagcaaagagaaagaagacaaaggccagacttccctctgagtgacggaaaattccttatcacatactgaccttgttattagaagacacttgatgcagtatttaggggtaaggagtcataacatctgcaacttactctcaaatgatttggcaaaacacacacgtgcgcacgcacacatacacacataagagagagaacggacaggatatgaaacaaacaacattggtcaatacagggggaagggtatatgggaattcactggactatttcaacaacttttctgtagattaaacacttttcaatatataaagttaaataatatattcatattccataacctggcaatttaagggaataatcagaaaatcacacacatactctgcacaagaaagtttatcacagatcagaacttgaaaacaccgtaaaacccccacagaggattcaataaacaaacaatacgataccaaagagccgccgccgacaacgacaacaacaacaacaacaacaacaacaacaaaagacatacttttttcaagggtatccatgtggaaaatgctcagtataaataggctactgaggggaagagttcccacactgagtacgtgaccccttcctatatgcacaggaagaagactgcagagaaacaccatgcaagcagtggctgtctctgtggtggtgtcacaagtgaaaatgactcttcctcacactcctcttccaaactttttttttttttttttttaagacagagtctcactctgtcacccaggctggagtgcagtgccacgatctcagctcactgcaacctccgctctctgcaacctccgcctcccaggttcaagcgattctcttgcctcagcctcctgagtagcctgccaccacacccggctaactttgtatttttagtagagatggggtttcaccatgttggccaggctggtcttgaactcctgaccaggtgggtgagtgatccacccacctcagcctcccaaagtgctgggattacaagcatgagccaccatgcctggcctcttccaaacttcttgaaagatcctagaaactatcactccagagcaataggaaaaagagcttacactggtttaagacctggattacccccaaaaggaagggaaggagattctgcaggcagtagtgacaactggtctcaaagtagcctggcgaagtggactgtgtaagactgtgagatctggtctcatgccccccaaaataggcaaggttaagagatcaagtaagacagtaaatgagaaaaaggtaaagttatatacacatgtaaaagcaactgtctatttgttttacaaggatgttcatcggcttggaagctattactacaggaaatccacatggtacaatgagatctaaagtccaaagagctgagtggaggtttgaatctgcttcctggatgatcctgggcaaactattcagcctttctgagcctatttccacctctgaaaatctgggatgatgaaattttttatcactatcctccctgttgaaagactgtgggctgggtgcagtggctcatgcctgtaatcccagcactttaggaggccaaggcgggtggatcacctgaggtcaggagtttgagaccagcctggccaacatggcaaaactccatctctactaaaaatacaaaaaattagtagagcgcagtggcgcgcacaggtaatcccagctactccagaggctgaggcaggagaatcgctggaacccaggaggcgggggttgcagtgagccaagatcgcacgactgcactgtagcctggctgacagagcgagactctgtctcaaaaaaaaacaaaaacaaaaaccctaaaaaacaacagggggacctgctgagtcccctgagtccctccatgtatcatgaatgagaggacgactgtcccaactcataaatcctggagttgctctgttgctcttggcctctgtgtggggctgccacatcgtccctgagaacaatgctgactgtgcgggctggaccactgtcctatgctggaaaagtgaggaacaagcagattcctcttgaaatgcctgcctgagccaactggccactatatgagtagaaaaattattttgacagggatcaagaagacagagattgaacaagatatctgcctaaactgcagctggagatgtggcaagaagatgtaaggactcattgtagaggagagaaatattttttctatcctttttattttcatccctgtaagggcaggaacaaatctttctgggtttggagtcagtgacaatactcacagcaaggagtccaacatcaaatactgagattcttgttttacaaaagtgatctattcttaaggttgtgaaattgagtcttctatttgacaaaaatcattgttacccagaaacacttttaaaatgttaatataattcactgctttctgcattatgaacaatgaaagcaagaaatctggtcaaactgggatgttgagaggtaggctgaggactggccactgtactatttcactaaaactggaaaaataatacaaatgcagactccagaggtgaaattcaggcgatttattgtaaacaggataaccctagcactccaccatactggctgtgtcacatgctccctctttcacatcaactggtcaaaaaagaagactttcttaagaagcctcaggtaactaataacttagttccacaaatctcatttactaagcactgcgtaaactgcagtatctggggtagtctgttattgctcatggactgcagcttggacccatctaaatgaatccattagtatgcctgagtgatcaacagcagctctagatccaacctggaaattggaaaatgctgacgcataccaaacaattgcaggttcatggaagactacatgagattgctctcagatctcttcatgtgtcattctcataaaaaagacacttaaatttcacccattttttaaaaaagagctaaaagttactcaatagcacataattttccacataaaaggtaggtggatttttatttactagtacagtggtggatcggaacactcaggcctaatttcagatctgtcttgtatatacttgcagtttaatgaaaagctgcatagtctacaaatacataaaaccagaaggaagtgatgatttcacacaccttctgatggataaagacaggcttcatataaggaggttcttgaaggtagggataaaaagatggttacagcaccacattgatctgacagtagaaatggagccccgcttttgaaagcagccccatagttgtgactatatcgttcttgcccaaaattgagatttggaaaatggcaaatgtaaaaacttaagatgtgaaaaggtatgactttacagaagaaagtcctagccaatcaaatcatatggggaggtaaaatgtccttcaaaaatgccattctttactttgcctgagttagtggatgacagggccacttactgttactagtgcttgtatatggaaatatattcacaatttctcttgaagcaagttttaataacagtaaatatttcaaaacagctgttaaatctacagtaacaatttcacctaaaatagtatctcatgaaaaaaatatttttttaaaagtctactccagtcatcatctgtgtttatatgtttatatttatatattcaaaaaataacttaacatttaaggcaagattagactggtagcaacaagggattttagagttttatgaagacctgctatataagaatgcaaggctttactttttatatttccaaaaaggtggctttgtattggctgccttttaaattcataaaggggcaagatattttggttcacatactgactgcaatttcactgtaataaaaagttatacaggtggttacaaaaagctgatgttggaaaagcatgtcacacactcagtaggatctgaagttgaccctatttgtacgtgttaaataaatatgttgtgttaaagcaatatgttgatgaggaaaagtaaaactcatggaacactgcaaaccaactatgaagaagtaggtcaatataattcaatcagaatgaaagaaaccacagtaatcctgagaaattcggtttaggacaaaattgatgtaaggtaagtctgtatttctagcattgtaaataagtagggttttctagcattttacgagttggcataaaaaacatgttcaaattttataaaaagattaaaaccatgccttatataaccagcatttcactaataaaagatgacattgctttatcatctgccaaatgtaatgttttccactgatttacatgaaaccatcaagtagaaagcaaatttgaggatcaatttttaaaaagttattacctttctaaatgttgtgaagccttctatgtcaagctaggaggcttttagaaaagagctaacttttaactttcttcggacaagtgactattttacagaatagggaaggaagattctataggaatatcattcattttaagcattgttatattggggaaatttctctcagtaatcaaaagaaaaattttaaaatatttaagaggcatgtatttaaaaaatattctacatctataagattttgtaatttactttggatttataatatttctacataatgacatttgacaattttttgtttgtttctctaatagtgaatcagaaactattaaagtggccaagatgattttcttaggctctggaagactcaggaatgcatccacttgcactttcccatgcatggggaatcttcagagttttgcagccatgaagttaatatgtggtttcacaaggggaaacagtggcagaccacgcttgaattcggtcatgttctgaatcacttcaggctgcaaagaaaaaagtttccttttagtgtatttaacctaaacatcagaataaggacatcaactttttttggcggacactgggagcatacctcagttctacttaatatactgtttttttgttttggcttgaggccgctctacctaataacccatgtatcttgatctgctgacctttcttctggatcagtatgtctggagggtcgtgaattggtctgtacaaacctatggtaagtgtccttagtccttttggttttcctctgggcaaacaagggctggctcaccaaggacttagaggcttcgcatcaaggcttcagcagagtagcagaggctggtgtgcccacccacaaaaagcctagttacactgccagtttcctcctcttgcaagctaatgtcaatccttctagatgattaaaatacgcaggtaacatgggagagactaagaagtctctctccagtattcagtgctgggaacagatgtggccagaaatgatccattgcaaaataacacaactgttcaaacaggaggcaaaggcagacaagggtagaggctgagtgactagatgttcagggaagaactaaagtagaagctccaacacctggtgacctgaaacttttagttcatcacttttagttcccaatgaacaagtttcttctggccgggcacagtgtctcgtgcctgtaatcccagcactctgggaggccgacgcaggtggatcacttgaggtcagtagtttgagaccagcctggccaacatggtgaaaccccatctccactaaaaatacaaaaactagctgggcatggtggcgtgtgcctgtaatcccagctactcaagaggctgaggcaggataattgcttgaacccaagaagtggaggttgtagtgagctgagctgagatcgcaccactgcactccagcctgggtgactgagtgagactccatttcaaaaacaaaaaacaaaaaacaaaaaaaaccaagctgcttcttctaaatagaaagtcctctgtcagtacaatctaacataacgttatatttcttacttgtggcaaggctggtgcttgtgacaaatttatgtcattttgacatgggaactctccaacaacaggacctataagaaaataaaaggtttaatactttgtacttattgatactatcacaaaagaacaaaaaaaaaaaactaaaccagactcagttaattaaaaacaccgcaccagccccgttcatgtacttctcagatcctctaaaggttgcctgctacccaaggccttaagtacttgtcctgccttctatccagagccacccagtgatggctcatgatattcctgaggtcataaaactttggccacagcagttttagggcccaggtctaatgtgactttctgtccacccagaaggaccttgctaggtttctaaactgttagtaaacttactagttttactaaactgcccagaaagcaagggagttaatggccacaggacaaactttggccagtaaaagccaggaaacgaaaggactgggaagttaacttgcttacccatactccccacatgcagtggttcatgcagcctgtttggagacaccccaacagcaagcagctgtgttttcctgtgatgctgtggctagctcggcattctatcacctggtattgcctctctccttcactacctcatttctcttttccccttatatctgcagaccttatctccagtttccgttctctacctcttttactttctggtgttctataaggcatgtagctatgacaaaggccaaccatcagatggctcaacatgagcctaaaaaggcaacatttgatacttacaagaatccatttccctggcaagaacatggacggataccttatgtctccttggagcatctactgccaacatttcctaggcacaaagaagagcagggtcacccttttgctccactaaagaacttacaatgaggtgttctctgaagactatgaagaatcagctatcacacagtcagatatagaaaagatgcttccctttctggccgggtgcagtggctcatgcctgtaatcccagcactttgggaggccgaggcaggtggatcacttgaggtcaggagttcgagaccagcctggccaacatagtgaaaccctgtctttaccaaaaatacaacaattagccaaatgtggtggcacatgcttgtaatcccagatacttgggaggctgaggtgggaggattgcctgacacgaggaagcaagtttgccatgtgccatgagccgagatcacgccactgcactccagcctgggtgacagagcaagactctgtctcaaaaaaaaaaaaaaaaaaaaaaaaaaaaagaaaaagaaaaagaaaagatacttccctttctttcccctcacttacattattttatttaagctctagaaagatttagcaaggcacgcaagaattattctttttttttcctttccttttcttactctaaggaaagaattatccttaacccaattttacagatgagaaaactgaatccaaggagattaaaaaactgctcaaactcctacagctaataagtgcctgagctaggattaaaaacctagcctagtactcactgggatgggctgtgcagggctgcacttggtgatctttagtgtctacagagacaatggtctgagcttagtcagggacaagcacgagtgcctgctcctctaagaaccttctcagactctgcttgtaaactgtggttcatctaccaaaagagaaaggaaactaacaattactgagtcctgcgttatatcaggcactctcctatgtcagctcacttaattctctgtgaactaagcatcatgatgattcttactttagaggcatggactctaagacacagcagcttacatgaattacatgggtcacacagttcataggtgatggtgtcagaagctagagtctgcttgctctctccattccaccatgctgcttggagggattccccttagttactaccatgaatgccagcagtgctaagttggcaggtggatcctgtggggaagtatgtcccaacctttcccttaacagcagacttctactgtcttttctaaaggggtacaaaattgtgacaaagttcctcttattccttagccacaagcaacgtttcatatccttagaggaaagaaatcatcagccaaaccaaatccactcaacagttatttactaataactgttactagttactagtaactgggcagttactaataagcctggtcctatgtgactgcaaggaagccctgttgatgttgcacagcaatcctgcccgtggctccccactctactccctgccagcaggcaaaacagcccagattctcacaggcctgctctgacctctccagcctctttccaggaactcagcccaggtctgcctctattaacatgtagtacctcatctaagaacttcatcttactggagtaaaaagtttgcttccaaagatctcttctccatctcttgtcacccaaaccttcattacccccttgtctacccacatcagcagacagcagaacaccttctccagtttcagattgttcccgattttctgaccaactctggacaatcctcatttttctaaaaacaaacaactgcaccttcttgcaaactattaatatgttctaaggaacactacagtcctgggagatatttataggtattctgtgtaaaaaaggatgcatggtgaaatcagtttagaaaatgttagtcaaaattaaataaatgcaggctaaagtctttactgtgggacttcttataatttctaaaataccaatacactctgattctctaagaatgcgaatagtctttcccaaacttgtatggtcatgaaacccttttcctaggtacccctattaatatcttgcataccatggaacacagctagggaaatgctgttccagacttagcttaggcctggttataaatactctctctgtttttttttttttttttttttttttttttgagatggagtctcgctctgtcgcccaggctggagtgcagtggtgctatcttggctcactgcaacctccaccttctgggttcaagtgattctcctgcctcagcctcctgagtagctgggattacaggcgtgcaccaccacgcctggctaatttttgtatttttagtagagacggggtttcaccatgttggtcaggctggtctcgaactcctgacctcgtgatctgcccacctcggcctcccaaagtgctgggattacaggtgtgaaccaccacgcccagcccctctctcttttttttgaaacagggtctagctatgtttccaaggttggtcttgaactcctgggctctagcgatcttcctgtctcagcctccccagcagctgggactacaggctattattgcaaaagaacaagagtaatttagatgagacacttcttttcctctatacaatgcaaaggaagccatgaggtaaagaaaatcacttgtccagccatccatttttgtagccaaaatgggtcaaatctcattgctgaaaaaggtgctttcaaaatactggcttctgctgctcagttctgaaactatagtctccttttcttattgttaaggtgatatcagctatattaatacttgtttgcatacagccttaataattttgcagaagagttgctgggagaggtgtaagcaactcatggatgatacaaaatcaccattttcctcaaagaaactatcagcacctttgggtcaaagactgttactttttccttaccctctcactcagcactaggagtggtgaattaaataaacattagaaaccctagtacaggagaaaatgtgatcaagcctcattgtaccactaacttcacaaagtcattctaatgagaactgtaagcactgactcctatgctggtagctatagtacatccctagaaaaaaatactgtagagtatctctctaaaaggatgtgggcacagggcaggactgagtccccgtccaaacaacataatgacagatacaaaccagaaatggctagaacattaagggacaattctaaggtactatggtaatcacagagtataattttgctccttattttgaaaaataggcatatgagtattttacacaaactagaggccccaatatattacaaaaaacatatgtaacactttaggtgcaattccattgcagcacaaattttgagtttttgcatttagcatacttattacacattcatatacctacctaatggaaattttgctatccttcttagaatttttatataggggaagatttagatggtgtgaacctctttttttttttttttttttttttgagacagagtctcgcactgtcgcccgggctggtgtgcagtggtgcgatctcagctcactgcaacctccgcctcccgggttcaagtgattcttctgcctcagcctcctgagtagctgggattacaggcacccgccaccatgcccagctaatttttttattattattatttttagtagagacagggtttcactatgttggccaggctgatcttgaactcctgacctcgtgattcacccaccttggcctcccaaagtgctgggattacaggcgtgagccaccacgcccagccggtgtgaatctcttaaagcttgctgggaagactttaatggtggtgcctccctttctttttgatagacttcctaagtgagcgcaagcatgtaaaacttataatatctctgaccacaattcaaaggtgagtaatcatttattttaaaaagcagccacagtggcacctaaatgggtgaagataatttatagttgtcagagcttggaaaataatctgattctcaagttcttttgttttctttgttcttccttcccaccaaacaagctcagcaatattctttgcagagtagggtggagaacagagagaagaaactgaaagggtgcctaaaaaggtagatctggaagtcaggaagggctgtcacagtccttggtttagagcatgggtcaatcttttggcttccttgggccacactggaagaagaagaattgtcatgggccacacataaaatacactaacaatagctgataagctaaaagaaaaaaaatttgcaaaatatctcataatgtgggctgtacatggcccgcaggctgcaggttcagcaaacttggtttagagggagaggaaaacagtacttggttcaataaaaactatctttattctaaaagtcattaagcgtttgtgtcaaaaaactcaaatccacaaaaacaccttcataaatccagcctgaatggcttcaaagcagcaacacacaatatagcacatacaataggtgttttggtttttttgaggcacagtttcgctctgtcacccagacaggagtgcagtggcatgatctccactcactgcaacctctgcctcccaggttcaagcgattctcatgcttcagcctcctgagtagctgggattacaggcgtatgccactacgcccagctaatttttgtatttttagtataaatggggtttcaccatgttggccaggctggtctttaactcctgacctcaagtgatccttccaccttggcctcccaaagtgctgggattacaggtgtaggccgccatacccagccctataatactttcatatcagtcaaaatctaaatatatgaatttgacttaccttgtagaatttgatgatatcttccttggtaagtgtctttaaatatgcaacctcagtgttatctgaaaaagtaatcaaacaatattttactaacattttcatatgaagcagcccagaacagtacactaaatgacaatatacttcactccaagactcttaagtatccatatatatttttttttgagacagagtttcactctgtcacccacgctggagtgcagtggctcgatctcggctcactgcaacctctgcctcctgggttcaagtgattcacctgccttaagcctcctgagtagttgggattacaggcacaagccaacacgtctgggtaatttttatattttcagcagagatggggtttcgccatgttggctaggctggtcttgaactcctgacctcaagtgatctgtccacctcagcctcccaaagtgccgggattataggcgtgagccatcgcgtctggccaagtattcacaatttttttttttttttgagatggagtcttgctctctcacccaggctgttgtgcagtggtgcgatctcagctcactgtaagctctgcctcccgggttcatgccattctcctgcctcagtctcccaagtagctgggactacaggcgcccgccaccatgcccagctaattttttttttcttttttatattcttagtagatacggggtttcaccgtgttagccaggatggtctcgatctcctaactcgtgatccgcccgcctcgcactcccaaaatgttgggattacaggcgtgagccactgtgcctagccaagcatccacatttttacgtgaccatttgctttgatttcaaataaaagtaagtggatgttggctgggcacagtggctcatgcctataatcccagcactttgggaggccaaggtaggtggatcactcgaggccagaagtttgagaccagcctggccaacatggtgaaaccccatctctactaaaaatataaaaattagccaggcatagtggagtatgcctgtagacctagctactcgggagaggctgagacatgagaatcacctgaacctgggaagcagaggttgcagtgagccaagatcacatcactatactacagcctgggcgacagagcaaaactgtctcataaaaaaaaaaaaaaaaaaaaaggccaggtgcagtggctcacacctgtaatcccagcattttgggaggccgaggcagggggatcacctaaggttgggagttcgagaccaccctgaccaacatggagaaaccccatctctactaaaaatacaaagtggtggcacatgcctgtaatcccagctacttgggaggctgaggcagaattgcttgaacccgggaggtggaggttgcggtgagccggagatcgtgccattgcactccagcctgggcaacaagagcgaaactccatcttaaaaaaaaaataataagtggatgtagtgcaatgggtaagagccttggctcaggagccaggccagcctggattcacatcctggctctctggttatgagcttttggatcttggccagtcacctcaacttttctaagcctcagtttcctcatctggaaattggggataataactacttaataagggctgcagtgagaattaggaaaaagatacatgacaataacactgctaggtacacggcaaatgctcaataaatgagagacagtattatcattaatagtgaatccaactgctagataaattataagtaggctggacgtggtggctcacgcctgtaatcccagcactttgggagcctgaggcaggagaatcgcttgagcctaggaattcaaggctacagtgagctatgatgacacactgtactcaagcctggctgacagagtgagatactctctgaaagaacaaaacaaaaataaaaattatgggtaaggaaactgaggtccaaaaaaggtgtcttgaccaagatttttagcttgttggtgtcagagtaagaacacaacccacatcctctgacttctagtacagcttagcacaatccgttgttaatctatgctctagaagcaaggtgaaaggaagctgattcaagacaagagacttcaagaatcacagctctcccaaatctgaaaggagtgaaaaatctttggagatccctacaggcaaatgtttgaactcctgtgcctcaagggcagcatttgcctcaaaggggttcaatctggtattatctcatttttttagtattatgggaaatagatacttaggtatctgtgatcagaatctcaggatacactgatgaaacaaaaatgtgaaattgaattattaatactttattgtgagatatgggtagatccaggtctaggtttggagggaaaaaaaagagataaggtttctaacagaaaactggggttaaattaagtaacagttctttggaagtgccagccatccccccaccccaactccccaaataggtaacggaatatcacctacaaaatgaataccattttgtagaatggccttaatcaaatgttacttgaatgccataaatgttggagccctaattttaccttacctctgtcaaaattatattgctgggagatgatttctccccagtatttagcacactcagcagatagcttctttggtttgtctagtcgacgaattgctaatgcctgaatgtgtttttggaaggcctcttctgtcatgtcctctatggacttttccatggtaattaagaaagcttccactctgctttctaggtagtgaggtggcttttctgactggatgatgaatctcaagccctgtatgccattagctcgacgtggcccgctgaagacgatatagcctgaaacacagacatcagccagtcatgaccgtggcatttgagacctgggtcatttttaatccttcaaaaactaacctgtctgagcaaataaaatctagtttaaggttttagagtattcacctcttaaagaaatatgagcacttaagatggtttcagttcctaaggacagagcagaagagctctctgaagaattacaaagttggagatgactttttcttcttcttaggaaaaaaatcctattcattattcaaactcccatcttgtcactcctcactctctgtgagttaatcctcttcaatctatgctaaagttactcccagaatataaaatgctggactcattttcatcccttagtgacagtcctagctgtgtttcctttaacatccaagttccgcatatgaacacggctctcctactgtatttcttgttagataatccattcctgaaccaattaattcagaatgcaactctctagagatcaagctaactaaaagtcatacttccatgttatctcatgaggacatgcactaccttccttcaacaccttttcaaaaccaagctcttggcttatctccttcagctgccctgccctgatctaccacctccaacagctgtggtgcctctgggtctcacttctgaggaagtttctatcttcaacatagccattcacagtttgattttctttgagatggagtctcgctctgtcacccaagctggagtcaagtggcacgatctccgctcactgcaaactctgcctcccgggttcaagtgattctctgcctcagcctcctgagtagctgggattacaggcatgcaccaccacgcccagctaatctttgtatttttagtaaagatggggtctcaccatgttggccagtctggtcttgaactcctgacctcaggtgatccacccgccgcagcctcccaaagtgctgggattataggcgtgagccaccgtgcccggccaatagtttgagctcttataataacatttaccatgctgtactaaaattattcctttacaggcctgccatcctgatttgactgtgagctcctcgaaaggaaggaccatccagagcatccattttccatgtccagcacctagcacaatgggtatttaaacaatgatgggtacttggagagactcatccttttttcactggttcctttctgtcattactggggcttctttgagcttctttcctcattgatcaaatctgccagtacctcaagacttttaacagtatctaaaactgggaacacttgctgtgccttctgtatgtcccaggcttgggatataaagacgaatgagagataatacctgccctcaaggaactcaggctttagtgaatctaagctcctctggatggctcatttctcatcttgctacccataagcttgtccttagtatccttttcccccacctaaaatgccctctttattgacatgtatgtaatatgcagtatcatctcataaataattgctttaatgtccataagatagtgattgcttatcttttagaagtggattctctgtaataaggttttctcaagtctctctaagtagaccatgcctgatatacagtgttaggtgaaaatgtggaaaatgttttacagggaaaataattcatcaaagtctacagtaccctgctatttccccactttcctctcacccaactgctccttggtgcgcagggtgttgaagcaaggttccgagataatctgacagaagagctccagaaacatattctctgaggtgctttgcatgtctgtttggtagtatatctcgatgccacagttattgtgaacttcatttctctgctgataaacaaaccatcctcctaggaagtttcaaaaagacagcagcaagttcaaaaacttatttggggtttaataaagtcaatgctatgtctgcccacacttacagatgataatttagacattaatagaaaagggaggtagagaagcctggagttgtatttcattgatttcacttttctgatcatgtccaactttgaccaacagtcaaacttactaattataaattggcagcactaagttccctctcatcagaaggaggggagccagtgccatggctcacatttatagtcccagctacttgggaggctgaggcgggaggatcacttgaccccaggagtttgaggctgcagtgagctgtgagtataccactgcactccagaccaagacacagagtgagaccctgtctcaaaaaaaaaaaaaaaaaaaaaagcagagagagaggaacgtggcctgtaagcctctctccctcacccacctcacatccttctagcctttttgtacttttttttttgagacaaagtcttgttctgtcacccaggctggagtgaagtggtgccatctcagctcactgcaacctccgcctactgggttcaagcaattctcttgcctcagcctcctgagtagctgggactataggcatgtgcccccacacctggctaatttttctatttttggtagatacggggttttgccatgttggccacgctggtcttgaattcctgacctcaggtgatccgcctgctttggcctcccaaaatgctgggattacagatgtaggccaccacgcctggcccttttctttttttttttttgagacggagtctggctctgtcacccaggctggagtgcagtggtgcaatctcggctcactgcaacctccatctcctgggttcaagcaactctcctacctcagcctcccaagtagccgggattacaggtgcctgccactatgcccagctaatttttgtatttttagtagagacggggtttcaccatgttggccaggctggtctcaaactcctgacctcaggtgatccacccacctcagcctcccaaagtgctgggattacaggtgtgagccactgcacccggctgcctggcccttttcatatatattctaaaacatcttctcggttgcagtgagctgatattgtgccactatactccagcctgggtgacagagtaagactccgtctcaaaaaataataacaaaaataaagataaataaaacatctcctttataatgcttgaaaattttccttttcacttgagacagtctgtcactctggcacccagactggagtgcagtggcacaatcatggctcattgcagcctcaacctcctgggctcaagcgatcatcccacctcagcctcctaagtagctacaggtgtgcgccactatgcccagctaattttttttattttaaattttttgtagaaacaagttctattttacccagcctaatctcaaattcctggcttcaagcaatctttttaccttggcctcccaaagtgctgggattataggaatgagccaccacccaggcctgaatattttacttttaaatactaagtgcctttccatggagagttaagtgaagaactatttaaagattcacatctgatcagctggctaattcagcatgatttcctaccacttagcattttgagaatgagatgtgaactgggctatttttgaacatggagaaatttgggagggtacttaggaggcaaaagagattaagatcctaggaaaggagacagaaagagggaagtagagtcaaaagaagtaagaaggatgaattgcactttgaaatattgtttctacactggcctcactttgaagtcaactgttatggctcttgcatagaatatcctgagtctttctctaattgtagtgggatcagcacatcctgagtcttgtcctggttttagtgactgaggaataaactggcaaaagttggaaataaaccactaccagatctgtgatgactggtcatgcacaacagcagagctgggctcaacgtatctctaagcattcaacaaaggtatcctgaagtaataatatgttccagttgctttagaagctactcaaatgaactagacacagactttggctttaaggaatgtacagtctaacaagaagatggagatgcacttcaatcccaacacaagagaagtgctaagtagcttgaatagggaggttcagaaaaattgtgctgcaagtccagaggtagatgtgattatttctagctgggagttttagaaaaagtttagtggaataagtagcttataaaataggcctggaaggagaagtaggatgtaggcactggcccatgaagaagaagggggaaaggagaacaccattttgggaggataaaatagctggggggaaaaggcagcacagatggttcatgcatagggaacaaccaaacaatcaagcttggccaaaaaaagcttctcttccttcatttaatataccttctattacacagttttgagcaatattgacaataatgcttaatgagtttttatcagaagaagccactgttaatgtaaaagtaacccaacattgtaaaccccaatatataaattcaataaaagtctttgttaatcccttataaaaatatacttgtaatgattacatgttatctgcacctgtgggtttcctaaaactatttctgccaaagaatcctatgggtttccaattaaatattataattccagtttccatttttataaatgtattttatttcatgactcatagtcaatacctttgtgatatttttacttcctaattccccttcattcaagtacccgtcaattccagtatcattctcttcaaaattattgcctatctccaattttacttatttggccctcctaccaaaaatttttttggcagaattacctatctctaatcataattctgtaaataggagaggttcccaagtaaatctttggcgtaaaactataccaaattcagcccacctgtaatcacccacactgttatgtcaaaatagtccattcccaaagttacaacatctctacttactgtcagggagctgaacttctctataccgaaccagctgacttggaaggagaggtttggtatgagcatgttcaatgagggtgtcttcaaccatctgcataattcctaatgcagcctatggaaaaagatatgtcccagcatattacaaaaacataaacatatcttgtttgtgaaataaactggctttgtttatcataaaagtggattctaaaaccttaaatatatttgatcctattcaaatggataaaaattgaatttgtcagtatggtcattttgcaatagagtcaatatggtagtggtgaaagaaacagacacccaaacaatcatcaacactgatgctgatgctggaaaaaaggcactgccaaagatggtctcaagtgaaatgatcctgactacagacacctggggtcacagaaaagcaagggaggcaaacataggctttattgtaggtaaaatgaccttggtaagaatcttgcttctgccacttattagcatctgaccttgggcatattgttctggagggggtatagcagagtggtagagaccaagggatcttttcttttttttttttgagacagggtttcgttctgttacccaggctggagtgcagtggcacaatcataactcactgcagcctcaacctcctaggctcaagagatcctcttgcctcagcctcctgagtagctaggactacaggcatgcactaccacacctggctgtttttcaattttttgtagagttatgttgcccaggctgctctcgaactcttgggttcaagtaatcctcctgcctcagcctccaaagtactgagatgataggcgtgagccactgcacccggccgagactgagggatcttgagacagactgccacggaaattttgtagtgctttccatgtgctaagtacttagcatgtactatttaatccttaccacacatgacgtaggtgctactgtaactctaattttacagaaaagaaaacagataagcacagagttaagacattttcaaaagattacagatctagtatatagcagagccaggatttgaatccaggctgtctaattctacagcacgtgctcttatctactatacaattatgccaccctatacagagtagggataattactcccatttcctcctatgattgcacaaggtagaaaacagcagaggaggcagccatgaaagttaggtcctcagttaatcaccatcattctactttccctgtgccctctaccttcctccacagagcaagagggttgagtaaactctaatgtgttccttatcacaccatgctggttaacaatcttgagaaagactagagggaaaaaatatcttgcaatgatccacaaaagattgctaaaacctcaaccacccacctgctttgttatgtttccatggagaagggcttcaatgtgcagccgtgacaggagctgaggtatgaaggccttaaggcgaggaagggttacatctgcaaaggtgtaagaagacatagtgagcgctacctatgagggattttttgtttgagataatttgagacttacagaagacttgcaaaaatagtacacagagctcctgtaaacacttcacctagttttccctaatgttaacatctttcataaccatcaaaactaagaaattaacattggtataatactattaactaaagtacagactttatttggatttttcccatttttatctttttttttattccaggatttgatccacaaccctccattacatttagctgtcatatgtctttagttccctctaatctctgacagtttctcagtccttccatatatttcatgatcttaagacttttgaagagtactgttcagttattttatagaagtcccacatttgggtttgtctggtgttttctcacaattagatttcatgtctgtattaccacaaagaataccacaaaggtaatgcgcctttctcactgcattctatcaggggactcatgaagttgatatgttgtagtactagtgatgttaaaactgatcacttggttaaggtggtgtctgccagatgtcctcactgtaaatgtattattttattcttttatttataatttaataactcatatgtgctctatatgcaatttggaaaagcccacttgcccatctacacctatttttccctttgtaattactaaatatttattttgggaaaagtaaatgagattatacaaatattttctttttctttaaatttgacccactaattttagcatccattggtagttattgcctgtagcaattattactatggagttctaatggcaatttttctatttccctctttctttttacatatattaatttaatccttctgtaaggaagagctgtcccttctccattaggacaccatagtaataactgctacatgcaagatctaccaatggatgctaaaatcagtgatagacatttaaggagaaacatgggaatgcaaataacaagtgcttaccacagatcaggaattttacagatgttatctttcacactataaagtagctactattatccccactttaaagataggaaaatgaagttaagaaaatttaagtttgttgttcaaagtcattaagctagtaaattgcagagctgggatttgatccttggtcaattccaaagtggatgttcattctattccactgtactgccttaggggtcctcttcactaggctccctcggcactctctgcagctttccaccacaatacttacccccttgtctctctctattaaaatgatctacttacatttatgcttcaccaccagactggagctccttgatcaaagaaaccccatctaattgatcattttaaatttttatttatttatttttgagacagagtcttgctctgtcacccaggctgaagtgcagtggtgcaacctccgcctcctgggttcaagcgattctcctgccttagcctcttgagtagctaggaatgcaggcatgcaccaccacgcctggctaatttttgtattttttgtagagatggggttttgccatgtttaattgatcattttttaatctcaagcacctgcagtcttgggctgggtgcatggcaggcagtcagtaaatgctgctggaccacactgaaccctgaagttcttgctaccctggcacctggatagctgaatgatttagagtcactgaagaggcagcctctcacactgagttgtttccaaattaagccattctggcattttggattattgtaggagtatatatatcaaaatggaataattatttacttgagcagaaaatttaaataaaaaaagaactgactattctctttacaaaatccattttaggaagccttcatatccctctgagatactatagagcttattctgcttaaaattaacatgccatctgacctagattctaacgaagggtgaataaaaccctcaaacctttgctttttgatcattataaaagtaggcttcgttttggaaaacatttaaaattaattgtgtggtatttttaaaaggtataattcttgctattaattgcatatgaccataatcattttgcaaagaaaagcatattaactgtcctgataaaaaaatgtacctgttctagtaagtgatttttataatctagtctcctatccaatgcctgaggcaatcaacaaaataatgactttcagtactttgctcgatttgtgtcactgatgacatcaaaagcatagtgttacgtaagtataagaacttgtcacaaaaggttattaaaacattcaacagaattctttttttttttttttttttgagatggaatctctgttgccaggctggagtgcagtggcacgatctcggctcactgcaacctctgcctcctgggttcaagcgattctcctgcctcagcctaccaagtagctgggactacaggtgaacgccaccatgcccagctaatttttgtattttttgtagacgtgggtttcaccatgttggccagaatggtctcgatctcttgaccttgtgatccgcccgcctcggcctcccaaagttgctgagattacaggcgtgagccaccatgcccagcccagaatttttttttttttttttttagacaagagtctcactctgtcgcccaggctggagtgcagtggcattatctcggctcactgtaagctccgcctcccaggttcacgacattctcctgcctcagcctcccgagtagctgggactacaggcacccgccaccacgcccggctaattttttgtatttttagtacagacggggattcaccatggtctccatctcctgacctcgtgatccgcctgcctcggcctcctaaagtgctgggattacaggtgtgagccacggcacccggcccaaaattctttttattgcattttaatgcttatggctgagcacataggaagaaagattaattggcgaggtaatgttgagaagtaaaaaatctaaaacaataataaagggtgataccaatctacatttttttccagtaaagaaatcctgaaagtaatttctttacattcaataggcattcattagatacacactgagggcataatattatactagatactaagtaaaggggtatggaaggcaggtataatcactgctcttaaggaattttggattttcaagccaaactcctgaaaattagacttaagattctagggaaaaaaacaacaaaagatgactctttaggctttcacattttccaatttttaactgaactgatctaaggatgctaaagcaggaaaaaaaaaaaaacctgaacattgtgtgttaagactttgaagttcagctaactttttcttaaaacttcaatattggccggtcgcggtggctcatgcctgtaatcccagcatgctgggaggccaaggcaggcggatcaccggaggtcaggagttcaagaccagcctggccaacatggtgaaaccctgtccctactaaaaatacaaaaagtttgccaggtgtggtggtatacacctgtaatcccagctactcgggaggctgaggcaggaaaactgcttgaacctgggaggtggaggttgcaatgagctgagattgcaccactgcactccagcctgggcaacagagcagactccgtctttaaaaaaaaaaacaccaaataaaaatccttcaatattaacaaggttagtacttgggtcagagcatttagtctgcagaaaaaaaaatttttttttggaggcagagacagagtcttgctctgtcatccaagctggagcacagtggcgtaatcatggctcactgcagcctcaacttcccgggctcaagcaatcctctcaaccacagcctcttgagtaagtgggaccacaggtgtaagccaccatatccagctaatagttttattattttttgtagagacagagtctcactatattgcccagggtggtctcaaactcctgggatcaagcgatcctcctttctccgcctcccaaaagtactaggattacaggtatgtgcaacccagcccttctgcagaaatctaaaagtagtaataattaactggtgtaggtccagattgaaaacagtaaatgtggctaacctgcctgaatgcaaaaaccacttcaaagccaccactgtttttttacattttatttttaattgacaaataataattgtagatattcatagagtatataatgttattatatatacatataatgtatagtgatcacatcagggtactaagcatatccatcatctcaagtttatttatcatttgtttgggttgggaatgttcaatatcttccttctacctatttaaaagtatatgttactgttaactatagccatcctgcccaccactgtttttataaaacatatacacagccagctttaatagaactacaagttatttaaaagtataaacagtcaatatcagaataaaccaaaatgaatttaggaaaaaaatgaagaaagcattaagctttaagtagaaagtctcaccatccagagcttcttttaactcatctttagtccaggccacttcagtcatcagcaagcggaggtagtacatggcatgctggtgaggctgttcagcccggaaattgttaagagatcgcatatactagtgaaagagacatgcgttcattaattttataaatcttttaaaaatcatttcaaaagtccagttataatcaaatttcaattctctataaactgtattactaggatattcccttctttcccctttctgaagttatataattaagaatggggtttattcctctccgatctttacataaaagtgcatgctttttctttgtccaagctacatttgttcagcatctgacatggactataagtgccttcactatgggatatctttagtccctcagaaagttatccctagttttcagggaagtcttttggaatctttaggttctacgctataaagccatccccaaagtctccataagcaagcaacataaataggtagccatataaaatatggaatctttatttgaaaactgatggtagtttcttctagtatacaaggaaaggtcatagtttagcttcagaagcagctgttcatcccatacttccattactgggccaaacatgaattgaatgtaagtggaagatatgtcaaacccaaatagtgtgctctaatgtgacaaggtcttgaggtaaagcagacctcagtctgctgaattgcgtgttcttctgaactagaggttgggatggaacattcaaggaggccctgacagccactaagtgcttctctttgaaattcagagctgcaactctgaattgcagtgagctcttggcacccacagagaagaggccaggtgtccaccagagtctactaggatttctttctggatggagtataggattttgcaatgacaaggtgagatgaatgccacagggttatgaattcttcttttcctccttgcttcttttatattataaaaactattatgaaaactttttataatatagcaatattatcttatgaataaaaaagcagggttcagaaaacttactgcttctttgataatttcaaatcttttttcatcaatctcaaaggtagccattttctcaataatcttctttagtaaaattggctgcttgtcattgtaacctttcactgaaagctacagaaagaattcagggtattaaaagtctaaaaatatcacaaaacaacttccaaataaacgacttgatttttaaacatgtagaaaatcccaaaacagacatgtaaaaaatgaaacaaattcaatttaatgtgtcataaatatatatagtgtaacacttaggaagataacattaaccatctttttttttttttttgagacagagtttcgctcttgttgcccaggctggagtgcaacggcacgatttcagttcactgcaacctcagcctcccaggttcaggcaattctcctgtctcagcctccagagtagctgggattacagacgtgccccactacgcctggttaatattttgtatttttagtagagatggcgtttcaccatgttagtcaggctggtcttgaactcctgacctcaggtgatccatccgcctcggccttccaaaatgctgggattacaggtgtgagccaccatgcccagccttaaccatcttttttaaaaaatatatttatttattcgagacagggtcttgctagggtacccaggctagactcaaactcctgagctcaagtgaacctcctgcctcagtctcccaagtagctggaactatatgtgtgagccacagtgcctggccattaacaatctctatacccaaaagcataattttacttttctgaaacaaaaccaacagtaagtaaactcacctgacaccgaactatggtggcatatactatatcatcaaaactcaaattctttttataaaattaattgtagaatgtggctaagttttttcttcaaaaagaatatctaatgaaaggcagacttaaggtttctacaggtgaggtaagaagataaaaatcacagggcatagtggcacgtacaagtcgtcccagctacttggaaagctgagatggaaggcttgctttagcccaagagtttaagaccaacctgggcaacatagttagactcctgacctcaggtgatccacctgcctcggcctcccaaagtgctgggattacaggcatgagccaccgtgccaggcaggatccacaattctaaccacttgcttatttggtaagttctgttggtgttccaaaagctaatggcaaaacaaatgtgtaaaaaggatacactgtatgtatcatcaggaccttggcttagcacatttttttttttctgagacagggtctggctctgccacccaggctggagtgcagtggtacaatctcggctgactgcaacttctgctccgcaggctcaagcgatcctcccacctcagcctctggagtagctggactacaggtacacaccaccatgtctggctaattttttgtattttttgtagagacagggtcttgccatgttgcccaggaggctggtctcgaactcctgagctcaaagcaatctgcctgccttggcctcccaaagtgctgggattacaggcgtgagccaccgtgcccagccaacttagcaaaatttactttgtctctaaatgcctaacattttgaaaagtggggaatggagaatttctatcatgatatttccacatggtggcacgcaaagcagtaggggatatcactgcagctagaatatcatgaaagtctctacgctgtacaggatgataggcaagaacctcagcaggagggaaggccactggccacggcaagcacatcatttttcctactgtaggaactagactgacaattagcagaaaacccattttgtcataaataaaaattatgtgttttgatggtaatatgctactaaaaatcaacagaaaaaagagaaaacagatgattacttttctatttggagctaattttgatctctgagcttcaaacttctgtggactctgggaatggttagattaataaacattcttatacattaaacaaaagctaccagagaatttatttatgtgaagaaaaaaaagtcactggaaaataaataaaatttaaaattcctacaatcttttgtgtaagaatttaaacaacgagtaccccaaaatgctcttgttttcatttttactaaaatatgcaatatattttcaagaaaagtgaagatgaatgtgtgccataaaagggatgttaactcggaattgagatataagcaagcttggaaacacattccaaagaaaggatctagttatttcttagatggatttaataaatgcttattttaaaacacacataaagtaggtaatggtgcatgctacaaaataagttttaaattaaaatgtcagatgtatctgaacatagaaactttatactactgtctgcagaaataaagggtgcctatttataagtaaaattcaatcaccacaacaactatggatatcttctacttacggatgttaatatactcaattatatagaaagaacaatatgctttcaggattaatatgttaaacatctcaggcagaagagcatgcaaataaacgtagcacacatacatgttcacaagatgcactaaactttattaaatcattcattagtggaactaacactaatttgagttctttgatcatcaaaaagatgcaaggaaaaaaaccattaactttcttgtttaaaaatgcgaagttaatagttttcccaagctcaacataatgcttaaacggggtggtgccttttctttggttttcattttacttacaagtattgcattcattcctgatgcaatgccatagctcaaacctgagaggcgtgctgcatatgtatactcttttaaatcatccttcaataacctgataaacaggtatgtcatgttgcaatggagaggatcagcataaatgtagcgactaacaaaaagaaaaacaaaagaaatgctttgatacctcaagcagtggcatggtaatgaagaaacatgaccgaagagtatggatatgcagcctcatgatctggatttctagggaaatagtatatgccaaccttaggttttacaaaaggaagacttcattttcctttgccaaagaccaagatttcaaatacagaatgggtaagagctaaacctaaatcagggtccaattttgtttgagtagaaaaatatgacattctgatgaaagacgtttaaaaaaaaagaaatcaaggaaaatttgcataatatgaatggtatgtagttgaacacttagaataaaagctaacttaaaaattaaatgagaaaatatgattagccataaagattaaaaaaaaaagaaattaaactcacaccctcaatcaaaaaatgcttccatcaaatcaatataaaaaatgttgatgagtggaaggctctaaggcgtgggtacttacatacatcccatagatggtattttggagatcatagctcaagcctgctagctctgctgcatatgcatactcgttgagtgagtctttgaggagctcaaggtacaaataggccatgttacagtgcaaggggtccacataagcaaatgggctggaagaaaatgttgacagtaaaatagctgattttattacttctcaatgtgatatggccttttgagatggatcaagatattgaacaccggttaatatgatttcctgaggatatggttgaattcttgaggctatttcttatgaggaaaaaaaagaagatgtctgaaaaagaagcctgaagtgtgtgtgagtgtgtgtgtgtgtgtgtgcatgcgtgcgtgtgtgcgtgcgcactggtagtagtgaagaaggagaaggaactgcctaccccagatggtgtggcagaactgacaagttagaaatgcagggtatgtgagcagtgggaacgggccaaaatgcatggctgtgcttaggctaatgggaggagcacggccgacagaacagatacagcatttgcatgtcttccctctctctccaataaagtcacatccttggtggacaggaataaaggactgggaaatgtgtctgtggtaattacatgaacttagaaaaattgagacctgtgaaaatgttagcttatccctgagttttccccaaaacagtaaagctagagaactgtcagtaaaataattgataatttctatcatataacagcagccaaaactagggaaaaataaaatagaaaaatattttaatgagaaagaacaaagaagaaagaattatagagtacaagaactaaaccaccacagtgatcaactaaacttcatttcccagataagaaacataattttcttcaggtcccctgagttcgtggcagcagagctgggattcaaatgcaagttaaatgacctgctcctttgactatacaaccttgcttaccttttatcagaagaaagtaaaggtctcactcattcaacaaatatgtattatatgcttactacagtgccaggctcttctctaggcactggaaataaagagtgaacaaatcaggcaaattccctgacctcagagttgataatctagctagaggggacacataataataaatttaaatttgacatattagttggtgacagtgctatggggtaaaattaagcagggtaaggggaatagggaatgatggggtgatggcagcagggaagaaagactgctgctttacataagatggccagtcaaggccactcttacaatgtgacatctggactcagacctgaaggaggcaagggagtgagccctggggatatctaaggggtggagtggagaacttcccaggctgaagaaatagctactgctaaaggcctgaggcaggtgcctgcttggcttgtttggcagcaaattaaaagtttcactctacttgtagcacagtaaatataactaatgtactgataacaaagtcaacattttgttttttaaagttgagtcaaggtctcactgtgttgtccaggctggtctcgaactcctaggctcaagcgatcttcctgcctcggcttcccaaaatgttaggattacaggtgtgagctatcgcacccagccaaaagccaacaattttatcaaagctgataaaaaagcaaaaatagggataaaatgtgtagtcacttagagaattaaaatcaaagacaaagttctacagctatccaaatattctccaactggaaaatctgaataaatgttctgccattaaattttttaaggtatgatacatgatgacagatttccttcttttggcaaatagcagctcaaaaacttaaggcacaattcacaaaaacaaaatcatcaaaacaaaagagaggatatcacagaggtcggccccacaggcaactatgcacctttctcaggtggaagtgaaaagccagaaaatccaagttttgggtctcaaagcactatggctcaggctcagaaaataattccaaggagtgtcctaaaatgctacatccagcctggcaaggtggcatacgcctgtagtcccagctactcaggaggctgaggtgggaggatcacttgagcccaagaatttgaggctgcagtaactgcactccagccttgggtgacagaggaagactctgtctcctaaaaaaagagaacaacaaaaacagctgtatccacagcagctgtgctggtgaagtggagaagaccctaaactaacttttaaaagagaataggattcaactgggatacctaaattctggttcatgtgttaattttaaaaatacgttattttgtaaccagatactatatgcttaaatatggatcacagggttttaaaaaccatagctaactacacataatataatcttatttctgaaaagatggaaaggatatagacacacacatgaaaatttcaattaaaatgtacaagaaacagaacagtggttacctctaggaagacagaccagagggagggatttgtgtgggaggcagacattttcagttctaggaaatgcgctaggcagtttagagaacacaaaaatgtaaaatggtctctcaaagggtagtctaaagaaattcatcatcatagaggccaaatggaaaagtggtgacaagctgcttagagtgttaaaaatatcactctcaaatatcaaaaaataaaaagcagctttgtaatgccctttaccaataataagccacaacctgacagcccatctttggtgtaaacaataaaaaatctctgcacagttctagataatctgtgaatctcatgcaataaaaccacaatatttataatcactataatctcaacatatttgttgatggaaaatcaaattcctttccctctttccaaagcatttaaaccttatctacctctaatttcatgtcaagccaactgaataaaaattaatgaaaaagctgattatcatattgaacattactgaacaaataaaccatgataggcttatcttacaaaccactgaattttagaaatataaaattatgaagtataaactcacaaagtaaaatctgaaacaggtgattaacacacaaataagtaaaggaagacaaagatgaattgaaggtgcactgagaaattactgcaatagcattattcataaattttactaaacatcttctccctttttattagtaatgtttaagtaatcaagccagaaatagaggaagcagtatctaagggttccagacaaaggacaaaacaagactcaggatcatttagtaactagtacctcctcttctagacaagttccaggaatacaaagccaaagcaataaaaacaccccaaattatttattctttcttcaatgagtcttcttctgggtaaatctacggcctcctcagaatccaaaaccctgaaggctaagaaggtcatcctaacaatagctaacataaatcatttcagctaaagggcatactcattaatggggaaagaaaaaaaaaaagaattaacaacactggtttttaaaatacctcttaacagcaacagctctccttttttttcttttcttttttttttgagacagagtctggctctgtcgcccaggctggagtgcagcggtgcgatctcagctgactgcatcctcctgcctcagcctcctgagtagctgggactacaggcacccaccaccatgcccggctaattttttgtatttttagtagagacggggtttcaccgtgttagccaggatggtctcactctcctgacctcatgatccgcccgcctcagcctcccaaagtgctgggattacaggcgtgagccaccgtgcccggccaacctctccttttctttacttttatttatttatttttttcagcctctccttttctaggtgaaataactctaattccttttatttctagacatggatgtttaagaagaacagacaactcctggaaacgtaattgttgatttttataagctttataagctagattcatcttacatacctgaaaaattcaaagttgagacaagccttcggcaaaaaaaacttatcatcttgtttgaaccaaagtttgctcatagctgtatcctgtgatggagaaacaatttggttagggaaatagaggcgcattcagcaaaaatgttcaatcaaatcactcttcaagaggaggaggacagaagcaatagttagagttttgttctggagttgctgtcccatgggccttgaagcatactcaagagtcagcaggtaggaagctggagacaaagactgcagactcctgtagcagagtgaaatctgccttctatttcccctgtattagggagatgggggtacagtgaaggaagagacagatcagagaagccaataccaactgtcctgtcttcgtctttctggacactaggaggaaggcagaggcagaagtcccttgcaagcgtatggcagccagcttccagggtggcccacaacaatccttgcctgctgagattcacagccttgggtggtcccctcccacactacaccagggttggtctgccttactaacaaaatatgacagaattaatggtatacctctgagactgcattataaaagacaccgcggcttgcatcctgatcactcactttccctcctggatcactcactttgggggaagcctgctgccatgtcaagcaactctacagagaggtccatgtggtgaaaaattaaggctggccaacaaccacataactgaacttggaagagaattctccagccctggctgaaccttcagatgactgaaaccttggccaacagcttgactataacctcacgacaagccctgagccagaactacccaactaagtcactgctggattcctgaccctcctcagaaactgtgtgagggccaggcgcggtggcttcactcctataatcccagcactttgggatgccgaggtgggtggatcatgaggccgggagttcgagaccatcctggccaacatggtgaaaccccgtctctactaatcatacaaaaatgagcagggtgtggtggctcgtgcctgtagtcccagctactcaggagactgaggcaggagaatagtttgaaccaggactcgggaggcagaggttgcagtgagccgagatcatgccactgcactccagcctgggcaacagagcaagactccatctcaaaaaacaaaacaaaacaaagaaactgtgtgtgagatacggtgcagcagctcacacctgtaatcccagcactttgggaggccaaggcaggcagatgacttgaggccaggagttcgagatcagcctggccaaaacagcaaaaccctgtctctattaaaaatacaaaaattagttgggcatggtggcacatgcctataatcccagttacttaggaggctgaggcatgagaatagcttgaacctgggaggcagaggttgcagtgagctgagattgcaccactgcattccagcctaggcaacggagagagactctgtctcaaaaaaaaaaagaaagaaagaaaaaaagaaactgtgtgtgagaaaccaggcatgatggttcatgcctataatcccagaaatttggaaggctgaggcaggatcgcttgagcctaggagtttgagatcggcctgggcaacatagtgagatcccacctctacaaaaatattgaacaattagctgggcgtggtggtgggtgcttgtagtcctacgtacacaagaggctgaggtgggtggatcactttagcccaggaggccaaggctacagtgagccatgactgcaccacttcaccccagcctgggcaatggaatgcgagtcttttaaaaaaaggaaaaaaaactgtgtgagataataattgttgtgggttgtttctttttctttctttctttctttctttttttttttttttttttgtgacagagtttcgctcttgttacccaggctggagtgcaatggcgtgatctcggctcaccacaatctccacctcctgggttcaagcgattctcctgcctcagcctcctgagtagctgggataaggcacgcgccaccacgcccagctaattttttttagtagagacggggcttcaccattttggtcaggctggtctcgaactcctgacctcatgatccactcgcctcagcctcccaaagtgctgggattacaggcgtgagccactgcatctggcctaacttaaatgttgtggttttaagctgctaaattttggaataatttaatatgcaaccatggataaccaacatggccaaggatgaacaaataagctacttatcttgcctctccacttcactcatgctatgctaagaatggctttagtcacttgaaactaccttgaaactctgggaagagatataaatggtttaatgttctcgttagtttgctctgggaaggcctatttaaaacaaacagcaaaagtcggatatggtagctcacacctataattccagctacttgagaggctgaagggggaggatcacttgaggccaggagttctagaccagcccaggcaacatagcaagatcccatctctacaaaaaattaaaaacaaactagctgggtgtggtgtgcgtctgtaatccagctacttaggaggctgaggccagaagatggtttgaacccaggagtttgaggctgcagtgagctatgatcccaccactgcactccagcctgggcaacagagagaccctgtctccataaataaataaataaataagataagataagataaacaatacataaaaaacagctgaggtaaatgaactttctctttgcataagctaatataaaactctttaaaatgtcatttttaaagaaaaacgggtccggcgtggtggctcatgcctctaatcccagcactttgggaggccgaggcaggtggctcccctgaggtcaagagttcgaggccagcctggctaacatggtgaaaccctgtctctactaaaaatacaaaaaatcagctggatgtggtggcgggtgcctgtaatcccagctacttgggaggctaaggcaggagaatcacttgaacttgggaggcggaagttacagtgagccgagatcatgccattatactccagcctgggcaacaagaacaagactctgtctcaaaaaaagaaaagaaaataaagaaaaatggttgtctcattaataatctagttgcttaagacaaattttagtgttcctaaacactaattgttatctcattgaactcatctaaattcttccaaatgttaggtcatctgaagaagataaaaagaaacatctgtgtgtgtgtgcctacagtcatgagtttagaaacagtttagaagggagaagaaatacgtttagaagggagaagaaatacgtttagaagggagaatgtgctgtaataatttgatacaattttttacatactttactcaagttctgaaataatagcatgaaaaggacattctgaaaaagatggggagggaaccctacttctcaacagccctttgcactagtttatcattccattaatttgagatagtcactatgtcataatgaatgtttttaagggcaggaaatccaacagctccccctggacttgctctctttcaggctttagagatcctttcttatctttaatgtccatgatgcagcataaacctacttccttattgggtcttcagcagacatggaaaagaggaacagacctttccacagacttgtggttacagctcagacttacttttttctcctacaaagaaagtgattccctagattctacactgtttagttttgtttgcttgctttaatatttttaaccttctaatattttttgtagttattctttctgcagcttttttgtcacctattaggatgtgagcctccccaaatcaacatagtaccaaatgtaagaaatcatttacccagtcccccatgtattaggtctgtcccccaaatttaaaatcactgattcaaacacattaccttaataagagcagggtatggtgtcgcctctttttctaacggtaaaatctcaaaattcgtaggaataaattcattctttgtaggaagtttaaatttcccattcaggtcagcattttgccatttctggatgaataatgaaacacacaaatgcagtaagagtctgatttaagagtttaaaatagtatctctgctcaatatatgggcaaatattaagtgcacaaatgtcacacagcattgttttccatcatatataaaagaggtactaccaaatctatcgatgggttttcctgaaacctgagttagtctttctagtactagcaaagattttgcactcatatatctactcttcctctccacatctccaaaatgaccagctgaggaacaattgagactatggaacacagaaaagctgactggtccatatgcagatcatgtttattctagctctttaaagaatggagaataatctgctcaggaatatattcccacaactgctagacaataggtcatttatataagagccatactttcagctatactaagttatatccatgaatggcctgaaagccaggctaaaggaggtgtctttcactttagtacttctctcttttttttcttcctgagacagtcttgctctgccgcccaggctggagtgcagtggcatgatctcaactcactgcaacctccacctcctgcgttcaagtgattcttgtgcctcagcctcccaagtagctgggactacaggtgtgtgccaccacacccgactaattttcgtatttttagtagagattgggtttcactgttgcccaggctggtcttgaactcctggcctcaactgatccacccacttcagcctcccaaagtgctgggattacaggtgtgagccaccatgcccggcctcacttcagtacttctttttttctttttcagacagaatctcactctgttgcccaggctggaatgcagcagcgtgatctccactcactgcatcctctacctcccaggttcaaacgattcttgtgcctcagcctcctgagtagctgggattacaggcgtgtaccaccacactcagctaatttctgtattttattagagatggggtttcactgtattgcccacgctggtgtcaaactcccctcaatctgcccacctcagcctcctaaagtgctaggattacagacatcagccaccacgctcggctttcagtacttcttaagaactggcccacacctctcccagatgatcatgtgaacttttaagtgaaccagtagttcaagcacaaggttaagaacaaagttgaggccaggcgcggtggctcacgcctgtaatcccagcactttgggaggccaagatgtgcagatcacgaggtcaggagttcgagaccagtctggccaacattgtgaaacctcatatctattaaaaatacaaaaaattagccgggtatggtggtgtgcacctgtaatctcagctacttgggaggctgaggcaggagaatcatgtgaacctggaaggcagaggttgcagtgagccaagatggcgccattgcactccagcccaggcaacagtacgagactctgtctaaaaaaaaaaaaagaaaaaacaaagttgagatttaggttgggattcacacaacctgtagtagactggatctgtttcctgttctagttccaaaagctaagtgggacagatcacaggccactgattgttgaacctaatttataaggcttttcattatttaaaaaaaaaaaaaaaaaaaaaaagcaactggccaggagtaaaaagcaaccagcctggacaacagagcaaggccctgtctatttaaaaaaaaaaaccaattgtcaataattctggatttctggattcagtaatttgatctctagctggtgtggcacagccttgcagattttacggttcttagttcctgcatttgtgactttcggcactggggacgttggccatatttcttaagtggtatcttaggtttccagaacagctgaatactagggactaggaaacacttagtaagtaatttcactactgagttcccagatagatgtgttcttaaaaaattcccagccgggtgtggtggctcacagctgtaatcccagcactttgggaggctgaggcaggcggatcacaaggtcaagagatcaagaccatcctggccaacatggtgaaaccctgtctctactaaaaatacaaaaattagctgggcgtggtggcatgcgcctatagtcccagctactcgggaggctgagctaggtggaggttgcagtgagccaagattatgccactgtactccagcatggtgacacagcgagattccatctcaaaaaaaaaaataaaattcccattcagggcaggttggttatggtcagagtccagtgaacagggggattctttcttcttttaggactatttcagacccagcactaattcatggaagatcagctttcctctcagtttagagagatggacattttcacacactggagggcttcaatgatcttctgtatcatgaatatgtcagagatctgtgaagtaccagtgatgatcttctttcttaaactaattcctttttttgtatgtcattacacaggtacatttttaaaatgtccattacttgagtttaactagaatctagcctgagtaaagttttctggtcttttcccaggaataagggacgcagtctcaaaggcacatagccaatgagaaccaaaagagaaagaaagaaaaagtactagataagtaggtaacattcacaagcaaaatcctgactactgatgaatgggacaaaatattgttttaacataccttttctgaaaatcataattctcctatgttgacaaaaagaacggtgctataacatgaggcataaaacatagcacctcctgaagtgaagatggtatgaatcctagagcctgctctcagcctgtgttcacagcaagactgtgagctctttggagcccttgcattggtttctcatgcttcctacttccatcgcttcttgcctttctggtgcctgtgcccatgtactctgcactttagttacattttatggcatgaggcacaaccctggtggtttgatagacacatgagaaggtggctagagtaccatgtcttcatgaaaaggctaaactccagctccctatctacttgttgatttctcttaggatggtacagataacactaggtcatcagtcttccacactctggggccttagttggtggatctagggagcaatgttcttgtgattcctcacatgtcaggcttattcatagatgagttaaccctaccttgatgacttcatccggtatagcttcttgtttgtactgggttccataccactcttctgtgcgatcagtttttccttcaaaagatttagaaactatggcaaccctagagatagaaaaaacaaacaaaaaaaccctgtaaactcatactgtatatatgaatttaaagaacctgactcaggacaatataaacaatatccaagaatgtgctgggcctcttaagacccagcaaatcctgtaaggcttagtccaaacaagcaatacatgaatagaggtttctgatcatagtccctgttatcctttagttacagtccattatttttagtatgaaaaagtgctcgcaggagagattcctctaggttgctactgactaaaatttaaaaagaagagtagctaggggaaaaaaatgtaacaaggtcagttaaaaacagtcagttaaaaaacagtcctaaaaaaagcaaagaagttgcggatgtagtggcttatgcctgaaatcccagcactttaggaggctgaggcaggatgctcacttgagcccaggagttcaagagcaatctgggcaaaatagtgggacccgtctctacaaaaaattgtaataattaaccaggtggggtggcacgcagctatagttccagctacttggaaaactgaggtgggaggattgcttgagcccaggagtttgaggctgcagtaggctagaatcacaccactgcactctagcatgggtgacaaatcaaaaccttgtctctttaaaaaaaaaaaaaccaaaaaggcaaaaaaagtactccttcctaggagtatctcaggtgcagaattaacaggaatgactaataaaacctgctggctcatccagagattttaaaaacgtgacacacatacccaagaaacttttattattgcttgctacatttgtgctctatgtttttttccctgccagagactagcatcaaatatgtctactacaaatacacaggccttcctgctactaggggagaaagggacaagaccaaaaaatgtctaccactgtaacctctgcctcccgggttcaagaactctcctgcctcagcctcccaagtagctgggattacaggcacccgccaccacgcctggctaatttttgtttttgttttttttttttgagttggagttttgctcttgccacccaggctggagtgcaatggtgcgatcttggctcactgcaacctctgcctcctgggttcaagcaattctccggcctcagcctcccaagtagctgggattacaggtgcctaccaccttgcccagctaatttttgtattgttagtagagacagggtttcaccatgttggccaggctggtcttgaactcctgacctcaggtgatccgcctgcctcagcctcccaaagtgctgggattacaggtgtcagccactgtgcccagcctaaaagctttttttgatgcgacagtagaaacagcccagaagagaagtcagatggaaaaaagtgttcaaggatgggcatggtgactcatgcctgtaatcccagcactttgggaggccaaggcgggaagatcacgaggtcaagagatcgagatcatcctggctaacatggtgaaatcccgtctctactaaaaatacaaaaaattagccgggtgtggtggcgggtgcctatagtaccagctacttgggaggctgaggcaggagaatggcgtgaacccggaaggcggagcatgcagtgagccgagactgcaccactacactccagcctgggagacagagcaagactctgtctcaaaaaaaaaaagaaaagaaaaaagtgttcaaggagggaaggcagaagtaaagtgatgtcaaaagataagtgaacaaaaaatgacaagactagaggagcaaaagaagttctgaacaagtggaactctaagccatccctgtgtagcactatcagggacactccgcctctactgccttttaatcattgaagttggaatcactacaccctcaccagtggactcaaccacaggctgggaccaatcctattttgaatcttgtgggtcaaggaattctagccaattagcttgggcaacttggtgtaaagtcagtcctgctattggttccacttctcccttaagtcccaattcccaattcaaataattaggtcccaattcaaataatatctgttcctgcttgttctcacctacccccagaggtttgattctagcctctgaatgttggcctcacagctgaaagcctagtacttgcaatcaaaactcccctctgatgatactcattcattttgagaatcccaatctctgttccaaatacctgccccttgttgaacctccccaacttcaacgctagtagtctgaactactgtctattttttattcattctagacaaaatactctacctggctgactggacttggtcttgtcatctgcttttcggtagatatcctaaagcaagatgactcacctgtcagtatgaccgactaatcttccagctgtaggtgttcctgatctggcctatctgtcactaaccactaccagttctagaaaacatgctaaataagaaatacgttccagagaaagatacagaggaatcagaggatttgacagataaaagagttctattattgcgtcagaaggaagtgatgcatgttggtagttcaagaatcccgtttgaggtgtatgtgtagagagttcacagaaatcatatagctatatgaagggtgtatggtatctcttaagggcattcaatacatgatagagcctatgaagactcaggcctaggaactcgggcttccacttttgttgatttctcagaaaatgaatggattgattctcaaggagacttctaaaaaatatactaagtagaagaatctggcagatggtcttcccatctactcttccatgaaacgcttgatttctttttttttttttttagagacagggtctcactctgacacccaagctggagtggagtggacttgccctctgaaacaagaaaaccttaaactcagttctgagagagaaagtaaacaagctgccaagccagatgctctggaagatgactatctgacacagaaagcagacactcaggctgtgcagtaatgctcaggttaaaaaaaaaaaaggaggggaaaaaggcagactcatcaagtacagtccttagggatttggatagctatataccaaagtgaggtgtatgggtaacatttgaaatgttattataaggaaacagacaagcacagttcctcagactaggcacagatcaaataccagactaacaaaaagagatacctttgcagaccaagagttagtatatcattaaggaattccagattgaaatatacaatgaaagggtatgtatgaggtaataaataaagacagggaagaaagtaacggtacagacagagtatacacacatcaaacccatatagatacctatgaaccagagtgtgaaagtacagggaagagcacttgaattaggagaaaaggtcacaataattgaagtacagacacctatagtatacacaaccgcagacagttgagaaaaactagtacaaatattgtagcattttagaccatctgccgaaaatctaattataccaaaaaataaggtttccttttttcgagacagggtcttgtacagtggtgtgatcataccttactgcagccttgaactcctgagctcaagtgatcctcctgcctcagtctctcaagtagctgggactacaggcatataccaccatacccagccaatttttttttttttttttttggtagaaatgaggtctcaccacgttgcccaggctggtctcaaactcctgagctcaaacaatcctcccaccttggcctcccagagtgctaggattacaggcatgagctaccatgcccagcccagttttttttttttttttaatgtggctagagtgtgggggaagaaaaggctgccaatatggtaatgatgtgatccttagaaatgagagaacaggccaggcacagtggctcaagcctgtaatcccaacactttgggaggccaaggcgagtgggtcacttaagcccttgagttcaaggcaagcctgggcaatacagtgagatcctgtctctatttaaagaaaaagaaagaaattaaaaaatgaaacatgagaaaacacaaccttttcatactaaaacttacaacagcaagaaaaggaaacagcgggctagaatgaatgctgttgacttcaagtacatttaaaaatgtttggagcgaatgcagctgtcgaagctggatggaactcatctggaaacaaaaggtctcctgactacagacatgaaaaggcaatatggttcccaaagaataaactctcctgagatttttacaaatgatgcctaacacagaatagggaaaagatgtccaaagaatgagaagaggcttcataggtaattgtgattaattcaaacaattagtggaaagggcacagacctggcaataagaaactgagattctggcagatactctgaatcactttctttgaaatcttgccaaaatcacagatctaagttaggcacaagccatttagcctctctaaacttcagtttcattaatttttaatttttcttttttttttttgagacggagtcttgctctgtcgcccaggctggagtgcagtggtatgatctcggctccctggaacctccacctcctgagttcaagcgattctcctgcctcggcttccatagtagctaggattacatcacactcggcttttttttttttttttttttttaagatggcgtctcactctgttgcccaggctggagtgcagtggcgcgatcttggctcaccacaacctccgcctcctggattcaagcgattctcctgcctcagcctcctgagtagctgggactacaggcacacgccaccatgcctggctaatttttgtatttttagtagagacagggtttcactatgttggccaggctggtctcaaactcccgaccttgtgatccgcccacctcggcctcccaaagtgctgggattagaggcatgagccactgcacccagtcttttgtatttttaatagagacggggtttcgccatgttggccaggctggtctccaactcctgacctcaggtgatccacccaccttggcctcctaaagtgctgggactacaggcgtgagccaccacacccggcctcaataatttttaaatagggattcaaattagatgaaccctctccttccactagtaaaattctacactatcatgatatcaaattagagttttaaaggatacacacaaaagacagaaagttgaaaaaaaaatctattgatgagattcaaaaatcatacttaaatagtgataggaaagctaaagtgctaaaggaattgaggctcatgaaaaatgctaaaaaccattttttaagtgttttttttttttgagacagggttgctctatcccccaggctggagtgcagtggcatgatcttggctcactgcaacctccgccccctgggttcaagcgatttccatgcctcagccttctgagtagctgggattacaggtgcctgccaccatgcccggctaatttttgtatttttagtagagatggggtttcaccatgttggtcaggctggtcttgaacacccaacctcaggtgatccacctgcctcagcctctcaaagtgctgggattacaggcgtgagccaccacgcctggcctaaagtgtttcttaaagtaagaaaaaagtcaagaaagattaggcttaaagtttagaaaattcagtcaacttttactgagttcttaccaggtcaaattctgggaaagacaaaatatagttcctatttggaaaaactcataatttaataggacacatgacctatagcaaaatgtaatcagttaatctcatgttaacagatggcaggactactcctctcttatttacctggtctttgaaataaacatggctctttaaactgtaaaggtggaccaaacacagaaaaaaggagttgaagataggtgaatgagccaagtatgaaaccacctctctagccaggtgtggtggctcatgcctgtaatctcaacaatttgggaggctgaggccggtggatcacttgaggtcaggagttcaagaccagcctggccaatatggtgaaaccctatctctactaaaaatacaaaaattagccaggtgtggtagtgggcacctgtaatgccagccactcgggaggctgaggcaggagaatcctttgaacccaggaggccgaggctgcagtgagccgagattgtgccattgcactccagcctgggcaacagagcaagactctgtctcaaaaaatataaaaataaaaaaggagaaatcacatctccaaacacagataagtcacaatttctaatgcttaggcaactaccaaatcctaacagaatcattgtccatcatcttttagaaatgctggagaacacgagatgaggcagaaaactggagatggagatgggcaaatgctgtaactttcaaaaagaaaaaaggagtgaagcctgaacaccataagccagtaaattaggaattgatccctgacaaaattctacagttaactgtcagactgtcagacatttagacaagaaaaccgtcgttatcactaggactttcatggactaattaagaataacttctcccaaataaatggaattatttatgactaaaggaaggcacatgacaaagactctatagctgtctttgtagatttaatatggtaaaacaggcaccaaatgataggatcaggggaggtgggtgacaatgatcattgagtaataataggtaaacacctttgaacaggtaatcaagtctcaaaattcaaaataattgtctaacaattaggactggcaaaaatgaaactggctaccttggtatttaatgagttccccatccttggaagaagttaaactgaagctggtaactacttagctgggatactgcagaacagatacacagtaccatactacaccatttaatataagggacttgagcaccttggattttgatatccatgggggtcttggaaccaatcccctgcggatatggagggccaagtgtatacctaacaggagttggattaaatggcctctaaggttcctttcattcttaagagtttcctgtttatttccctacctggttgcaatgttaaacttgtctcagcgggtattaaagaaggtaatcttacccttgagccaccctagtctggtctggcagctggcaatattatcccaggctgttttgcaccatgtatcactgacctactacagttacaactgttaacagtcacagagaccaatcctgtagaggaaaagtgctttctctttaaatgtgagagtaaaaagaggtatttaattgcataagatatcaaatttagaaatatgcaatttcaaaagtaaaacatatgctccagcaaatgcactcctacgaagtgttgctgggtcaattactggctctagagcagcaagaattataatttaaatcatggttttttcttacaaaaatgaaaaagcacatccttattatatggtataactttaatatagcattaccttgtgtttgtacaacactttttgactttgctaaatcattttacatcatacagataaagcactatccccactttgcagatgagcagggttcaaggaaattaaatgacagccagtattcatgacattatataaagttaacttttcacaagtccccctttcaggactgtcaactctgaggtttcacgtaagtgattcaataaacattgaaagaaaaaaatgatgtatccaagatctcatgactagtagtaggtgacaaaaccacacaaaattagtaactggaaggaatcttaaagattgtctagtgaggccgggtatgggggctcacacctataatcccagcactttgagaggacggggtgggtggatcacttgaggtcaggagtttgagaccagcctggccaacatggtgaaatcttgtctctactaaaaaaaaatacaggccgggcatggtggctcacacctgtaatcccagcactttgggaggccgaggcaggtggatcacctgaggtcaggagttcgagaccagcttggccaacatagcaaaaccccatctctactaaaaatacaaaaagttagctgggcgtggtggcaggcacctgtaatcccagctactcgggaggctgaggcaggagaattgtctgaacccgggaggcggaggtgcagtgagccaagatcgtgccattgcactccagcctaggcaacaagagcgaaactccatctcaaagaacaaaaaacaaaaattagtcaggcatggtggcgggtgcatgttatcccagctactgggaggctgaggcaagaaaattgcttgaacctggaaaacagattgtctaacaagttctattagtaaatctatagctctttctcctcatgttggtaagaggttttatttgtagaaggtatatgataaaattcaaccggatttaggctgatttttcccccctggaaatataggtacactgaggaaaatacaaatatttaaactgttttacttgcctaaatgaggcaagtaaattaaaaccagtgtggcaagtaaagtaaaaattagtgtgtgttctgggtatttttcttcaatgtattttaatgatgtaagtaaatgcatgtatcacttaagagcggtttttaatattgatgaagtccattttattggtggtttttcttttttttttgagatggagttttgctcttttgcccagggtggagtcaagtggcatgatcttggctcactgcaacctccggcccccaggttcaagcgattctcctgcctcagcctcccaagtagctggaattaccgtagagatgaggttttgccatgttggccaggctggtcttgaactcctgacctcaggtgatccacccactttggtctcccaaagtgctaggattataggcatgagccaccgcacccagccttctttaagacagggtctcaccctgttgcccaggctggagtgcagtggtatgatcatggctcactgcaacctccacctcctgggctcaagtgatccttctgcctcagcctcctgagtagctgggactacaggcacgtaccaccacaccctgctaatttgcatacttttttagagatggggtttcatcatgttgcccaggctggtctcgaactcctgagctcaagcaatcctccctctatgcctcccaaagtgctggcattatgggtgtgaaccactgtgcacggtcaatgtgttttcgttagtggttactgcttttcatgttctatctgagaaatctttgcctatcgcaaggttttgaagatatttttctattttttctggaagttttatagatttagtgtttatatttaggtctatgatctatctcaaattttataaatagtatgaggcaaaggtcaagtttcatcatttttcatatagatacgcagctagtagaacagcaccatttgttgaaaagattttccattctcaattatgttgatgctcttctcaaaaataaaatcaactgactggccgggtgcagtggctcatgcctgtaatcccagcactttgggaggccgagaacggtggatcacctgaggtcatgagttcgagaccagcctgaccaacatggagaaaccccgtctctattaaaaatacaaaattagccagacatggtggtgcgtgcctgtaatcccagctactcgggaggctgaggcaagagaatcgcttaaactcgggagatggaggtttcagtgagctgagatcgcaccatggcattccagcctgggcaacaagagtgaaactccatctcaaaaaaaaaaaaaccccaactgactgatagatgaatgcataaagaaaatatggtatatacatataatggaacactatttagccttaaaaagaaagggaatcctgtcatatgctacaacatggatgaaccttgaagacattatagtaagtgaaatgaaccaggcacagaaaggtatgttgtatgattctacttacattaggtatcgaaagtagttaaacccatagaaacagaatgtagaatagtgattatcagaaggcagagagaaaagggaagttgttttttaatcacaacaaaaaaatcaactgaccatgtatgtgtggaactatatctggactctgttctcttccaatgatttctttgtctatccatatgatgtcaatactaccgtgtcttaattactgaagctttatactaatgtcctcaaatctagtggtttaattcctcccacatttggtgatttttttttttttccggagtgttctgacttatctaggtcctttgtatgtccatataaattttggaaccaatttctgaaaaaaggaaaaacagcctggccaacatggtgaaaccccatctctactgaaaacacaaaaattagctgggcgtggtggcatacacctgtaatcccagctacttgggaggctgaggcaagagaaccgcttgaacctgggaggcagaggttgcagtgagctgagatcgcaccactgcactccagcctgggcgacagagtgagatcctgtctcagaaaaaaaaaaaagaaaaagaaaaaaagaaaaaaaaggccaggtgcagtggcacatgcctgtaatcccagcactttgggaggctgaggtgggaggatcatttgagctcaggagttcgagactaatctgggcaacatagtgagactctctctctacaaaaaaattaaaaaattagctgggcattggtggcacatgcctgtaatcccacctacttgggaggctgaggcatgagaattgcttaaacccaggaggaggaggttgcagtgagccaagatgacactagtgcactccagcccgggcaacagagcaagactctgtcattaaaaaaaaaaaaaaaaaaaaaaaaaaaaagccggtgcattggctcacgcctgtaatcccagcactttgggaagccaaggtaggcagatcacaaagtcaagagatcgagaccatcctggccaacatggtgaaaccctgtctctactaaaaatacaaaaattagctgggcatggtggcgcgtgcctgtggttacagctactggggaggctgaggcaggagaatagcttgatcctgggatgtggaggttgcagtgagccgagattgcgccactgcactccagcctggtgacacagcgagactccgtctaaaaaaaaaaagaaaaaagaaaaaaggccgggaacggtgactcacgcctgtaatcccagcactttgggaggctgaggtgggcggatcacctgaggtcaggagttcgagaccagcctggtcaacatggtgaaaccccatctctactaaaaataaaaaaattagccaggtgtggtggcgggtgcctgtaatcccagctactcaggaggctgaggtaagagaattgcttgaacctgggaggcggaggttgcagtaagccgagattgcaccattgcacttccagcctgggtgacaagaatgaaactccatctaaaaaaaaataataataaacaaacaggtatagtggcttgcacccataatcccagctactcaggaagctgacgcaggagatcacttaagcccaagaggtcaaggctgcagtgagctatgatcccgccactacagtccagcctgggtgacaatgcaagaccctgtctctaaataaatgaataaaaagaaaaagaaaaacagcctaccaggattttggttatgattacattgagtctatgaatcagattggagagaactaacatattaataatatcaagtctcctaatgtatgactatagtatgcttctccatttatttaggtcttctttcatttttctcggctaatatttgctctcttctactgtttttagttttttatgtagaagtcttgcttatctttggttaaactcattcctagtaatattatgcttttgttgctattataaatacttcttttaattttctatttttttgttgctatatatagatatgcagttgatttttgtatgttgaccttgcaacctgtgactgtgctgaattcagttattggttccagatttttgaaggggaaagtagattccttaggattttctacatatgcaattatgtgtatcagtgcatatatcactttaaaccatttaaattatgtgaactatatctcgccatcccccactaaactacgtcaggcatgaataacttaacatattacgttatacaaatatttaatctacaactttctctgttgttcactgaatggaaaaggaaagatttcttcgtttttcaattcctcagtaaattatctagagttgaaaaagagcatttgctgttaaaggcagaatgatcaactcagcaatctctaatgaattcacagctgtcagtaactttgtctagtttttcagtaagattttctgtatcataatcaattcttgagtaattaaggattaggcaataaatggggacttaaaatattggcaagaaactgcgtaggaaacattgtaacctactgggtacctcaaaccagaaatttaatttctaaataatttcacatgttattttcattgaaaaagacttctaaattttgacccttaatatattttttaaacctcaaaaccatggtatcttattccaatttaaaaattctaggctcagtaagaaaaaagaaaagaaaattctagactgggcacagtggctcacgacggctgtaatcccagcactttgtggggctaagccggactgcttgaggccaggagtttgagatccacctgggcaacacagtgagaccctatctctataaaaaattgttcttgaagctagataattatctgtactcatccaaacactgtatcataatataaaaaaatcattaaaactttttaaatacagatagggtgtcactatgctgctcaggctggtcttaaactcctagtctcaagtgatcctcctctgccttggcttcccaaaaaatagaatatttagctgaatcctagcatgaggtcaggtaaaatctggctaatagtatttcctagaagaaagtcacccgagtccaccaaccacctaggagtgacaatagataggccaagcccacctgaacattagaagacattaattattgttctcaacctaaacagtatagtgcaagtcatatatatgcaattatcgctaatgaagctttgataatatgtctggaaaagttcaaacaatggtaactaggaaaagattctgataggatagttctgtcaaaaagacttttttttttttttttgagacggagtttcactcttgttgcctaggctggagtgcaatgccatgatctcggctcacagcaacctccacctcctgggttcaagcgattctcctgttgcagcctcccgagtagctgggattacagatgcatgccaccatgcctggctaattttgtatttttattagagacggggtttctccatgttggtcaggctggtctcgaactcccgacctcagctgatccgcccgccctggcctcccaaagtgctgggattacaggcaggagccaccgcgcccagcccaaaaagatttttttttttttacaaaaagttctatcacattgttgatcttattcataaaacaactgttccaaaaaacttactcaataaccaaattgccagtagaatttcaaaaatacttccctaacagaggagaaaaattaaaaatgtaaaacatgtcattcaattatattccctctatcatttgactttagaaaacatagatgaaattcagttttatgggaggaatatcatgtggtggctcacaagcactttaaggactactttcctctagcaagaatacctctgctactataagagtttggacttttgatttccaggttaaccactggtcaatcaggaggattctgagattgtaatctttactgtggcttaagaaaaagagggtgccttcatttgcttatatgagtcagataggtgggctgatactttgggcgtttgagttagaataaagccaggttaagacaggttattattctattttatttatgataataaaattatatttgtttttaaaaatgtcctcatcttttagagatattgcctcaaaataatttagggtggaagggggatgactgaagagggatgggtatagattaaaaaagactggccatgtatcaatggttgaagcttggtgttgcttcattatactattctctacttttgtaatgcttgataaaatgtttaaaagcattttattcacaatttcaaattttttcagattctaatcattattgaaaatttagtgtataatagtaaaatctgtatggtgactcaccggacattttctggtctgagtttatcgagaaccatctctattaagtcaggtctaaattcttccagtaaatattccgctgtgagcacctcttctaggggataatacttttaaaaaggaaaatataaataaataaaatatacaaagctactacatagtttattaaagcagatctgtaacacattaaattcattactgtacaccctttctctcttcagttaaattttactccattggaaaaattttctgtagccctaaatcgttgtctctttcctaccacattgttaagcagtttcatattgtttgatgattctgccaaatatactgttaatccccaaacatacttccattgtagagagcaaaatcacatttctttcggggaaaaccacgaatgtttctggttaaaaactgagtacttgttaatgaagaaaattcgatattaaaatgctgacacctacaggatttttaaaatataaagtacacacatttttatgaacagaatttcctcctaaatttctatgaaacaaattagacaaacatttaggaagcggctgtggaaaaaaaaatggcttatatttttggccagtgtagaaaaacaatgcagaagatgctttttggtaagagcaacttccaatatactgagacacactgactgattcattcatctaataaatatttaatgaacatctactatgtgccagacactgttccacacactatggatacaaaagtaggtaagacacatgaaatcctttgtcctccaagaagcacacagacattgtaattgggagggaggcagacaacaaacaaatattgtaatgttagtgagagatgctatgaaaacaataaaaaaaggggcaggggcattattttagattgggaggtcagagaaggtctgaggagaagaactctgagtggagactgaaatgataagaacctagccaggcaaagatcagatagaacagtgtttcatgtagagaaaatagcaatgggggaggaataaacttaatgcttgaaaattagagagccagtacagttggagtggaatgcaaatgggagaggtgggctggacagtggtatagaagatggccagataggctggggccacatcaccttgtaggccaaggaaaattttgcattttatgccaactctgttgggaaaccactgaaggaatttaaacagaggagtgaaacattcagattttagttttcaaaagatcacgagcctggaaaaataaactacaatggggaccaagaggaaaatagggatcgcaggtaaaagactatcatggtagcccaagcaagaaatgatgatagctcagactaggatggtagcaatggaaattttaaaaaagtaaatgatcaatagctttcatataagtaacacctgatatgctgtagaactgaaatatatttaaagccaataagcaaaatgcatatttaataaaaatattacataaaataaatttcacgatgatgaaaattaagattttaaacatctcctgacatcaacatttgccctgttgctacaaagttgaaagctttatacctcagcttcaattgtaatcattcacttattactgaaaatatatgcaagattgctgaaatactccacacagcaatgtatacagtaaaataacaacaaacttacatgcaatattcctgcaatcttagatgtatagccccgtggcctctctttgtctttaaacctaaaagcaacagcattcaagtcctaaaatagaaagttaatccaattagatacggccacccttatttagaaacctttttttttttttttaagtgtttggcttgcactataagctttctactccatatttaactttatcacactttctgaaaaaatggctatgcttgatttagaaatgtatagaatattttaaaaatttcttaatgtgtataaaatttaatccatcaatctaggcttaaaaccaaaagcaaaataggtaaacaactttcaatgaaaataacaaatacaggatatggctcgatagcctaagttgttgaaactaatagccaaagaatttagaaaaactgtgtgaaagaaccttgtgagatccaacaattccaccatagatgattttggtgactcattcagagaacagcacccagattaggagttattgtcataattttcagaagcagagattatacctttaaacttttatctagttaaaaaggatgtttctcatactaaaatacatttgagaatctcgataggctttaaagcacgtatttttaaaaacccttttttaaaaggcttttaaaaatttgaaagacaaacaccatttgttttacgcaaaaaaaaaagccagcctcttcccatacatacaataataaaatcacttttaataacacaatcatacataaagcaattcattacttctttgagagtttgctacagatttaaagatctgaaaacgacagagctcatgcagcttcaggcagggagtaacataatccctgacatattccagctcaagaaactgctgattttcttctgagtgatggaaaagcatttgatttcttcccttttccatcctaaaaagggctacacgatgcctttccccttagttgtgccccaagtagcaaatcagactagtacaactaagccttaactaatactattatacattgcaaaattttagacttcagttaggaaaaaaactttaaaagtttaactgggccttaaatttaaattaattcacatgtatttgctcttgaaaaacagattccttaagaaaaattttggtgaaacaaaagtaccttgcactcttggaaaacccattcttgaggtccttctgcacgtaacttctgaatgtattgaaacatgtgcaaaattatatcttcaacatgtactggaaaaaaggggcacacttaaaaaccattcagtccttgaatccttcaaagcagtgagctcactcctaaggtaaagtcagataagtggaagatggtccctcttagaaaatgcagtcctcacctccctgagactggctttacgtgtcccacatacatggccctctgggctcagagatatgtgacagaaagggtgttggggcagtaaatgagcaaataaaaagccaagtccacatttaacaagtgcaacataatgatcagttgttaaggggggaagaatcatccatgaaacaaaggccaagttacatatgaaaaatacaatggataagttgtatgaattaaagtgttgtagctttcaacataaaacagatccacagcatgaagaagttaaaaaacatcatagaaagtaaattttcattcaaaagtaaaaaggtgaatcaatacttacataatccttcctcggtcaagtccacattaatgataaaaaacataaaacctcgggctccttccttctgcccaccaacaagagtattaacccagcctgcaacattcaaaggaaatcaatacgattgattgcatatgtggcttccttgaagataagaaaaattttaaaaattcatactgtatgttcctaagatatcagaatgaacctcttgcgaaaagattgggaaaaaaaaatcagttcagaaaagcagtttaagatggtgcagaagtgggggctttcctgaagattcctcaaatcaattcccagtcaagagtagactactggctgggcgcggtggctcatgcctctaatcccagcactttaggaggccaagatgggcggatcgcttgagaccaggagtttgagactagcctaggcaaaatggcgaaaccccatctctatctaaaaaagaaaaaaaaaaaaaaaaggcaacagcgtgccaacaaccaccatctcactcactaacccaaaatggtcacatctaacaatgttccttcataggacactattcaggagaaaatgagagccagagtgaaaagatgtggtggacactcagaagatgctgcccaggagacttaccctttgacttaagttctgataacagacttccaggaccttcatgcccaatgagatgaccaagataatgaccaggatttgatttgtagtatttctgaaggtcaggtatgggaaatgtcacatagagattcctaatatctttaatgggtactattttgtaaagttgctggagaaaacaaatcacagagattagctatatacgactcctactgaagaaaatatttctaaactatgaagaatgattttcatgggagaatcccaaatttaagagcaaatcaattgccacagaaaatgatacactgaccacaaagaaataaatgactcagcactctcctagtggaatttcattacagtcggtatatagtccatgtttgaccccctgaaccatgcagctaaatattaatggttttgaatgcttatcttcaggtacaggttaacagcttcaacagtctattaagactacagctaccaaaactacttttagcatgtaaagaccagaacatattgatatgtttttggtgattcatgatcctaataaatgtgagattgattttattatcccgacaaatatttaaaaccacatgggggccgggtgcggtggctcacacctataatcctcgcactttgggaggctgagggagacagatcacctgaggtcaggagttcgacctcagcctggccaacatggtgaaaccccatttctattaaaaatacaaaaattagccaggcacagtggcatgcacctatagttccagctactcaggaggctgaggcagaagaattgcttgaacctgggaagcagaggttgcagggagccacgatcgcgccgctgcactccagcctgggcaacagagtgagactccatgtcaaaaaaaccaaaaacagaaacaaacaaacaaaaaacactacataggggctgggtgcagtggctcacgcctgtaatcccagcattttgggaggctgagacaggtgggccacttgagatcaggagttcgagatcagtcaaggcaacatggtgaaaccctgtgtctactaaaaatacaaaaattagccaggtgtggtagtgtgtacttgtagtcccaactactcagaaggctgaggtgggaggatcaattcagccagggaagttgaggcttcagtgagccatgatcgcaccactgcattccagcctgggtgacaatgcaagactctgtttccaaaaaaaaaaaaaaaaaacacaacataaataatgaaacctccaaaaattttcacctgttctatggtaaactaggtatatattatgtccataaattaagaagacaaaataccaaaatttatgcacttactttaagatgttcttcttggaaagggtgttcaggaaattctggcaatggaacatttttgttctctacttcagaaaataactttaccaccagattagtcaagtcatctaaagattctacaagaaaacagacaaggaaaacagaacttaagcgaatcataacatccaacagggagtgcttaaaatcttaggatctcctgaaaagtctcagtactactgaaaggaaaatgtgaaaatgattacacctcacacctatctgtttctactttaaaaaattattcacaaatattattcaaaatattatttcacaagtattataataaaattaaaacaaatattagaaacaataataattgcatttggaaaaatgactatgattcccaacaggcatatatactgaactactagcagatagagtataatgttcaccttatacatagacagagaattgccttctatggtataaaattatcttttgtgcctttaaatgtatttgcattttatttataaaagacgcctatttttactttagttttttgacacgtatgaaggactccaaaatgcacattttatatgtgtgtgtgtatatatatatcacatatatgatatatatcacatacatctcacatatatgatatatatcacatacatctcacatatatgatatatatcacatacatctcacatgtatgaaatatagcacatacatctcacatatatgatatatagcacatacatctcacatgatatatagcacatacatatcacatatatgatatatagcacatacatatcacacatatgatatatatcacatatatatcacatacatgatatatcacatatatcatatatatgatattagcaaaattctacttttggaagtataacaagaaatgagttagatctttgagaagagggcacagcagtcataggatggaataaagaacagcttgctttttattttatacctttctgtgtggaattaaattttttccatttgtacaaattactattatcctaaaaagaaagcagtgttaaaaaaaaaaaaaaaaactttttttttttttttttgaagcaaggtattgctctgttgcacaggctggagtgcagtggcacaatcccagctaactgcaacctctgcctcccaggttcaagtgattctcatgtctcagcctccccagtagctgggattacaggcgtgtgccaccacaccctgttagttttttgtatttttaatagagacagggtttcaccatgttgcccaggctggtctcaaactcctgagctcaagtgatctgcctacctcagcctcccaaagtgctggaattacagatgtgagccaccatgcctggccaaaacctgtctttttataaacaagataacctctcatcttgattctgtctcctcaaaaataggttatttataaatggtataaacattcataacctgttactgtcagtaagcatttgaatcaaataagattcttgccttgatattctatgacccatttggaacttttccatgaattctcgagagtactaaatgactatttgagagctgcctttatatggtgtaaaattctcttttgtgcctttaagtgtaggcatttgcattttatttataaaatatacctacttttgcctcaatttttttgacatgtatgaaggactccaaaatgtccagagccaaataaaaggcagatcagtggctgcctattatatgacaagtgaatttaggaatggagaaggaatattgtagcaagagatgtcagagacatctttttgcagatgggacatatgacttgaaacaaggtgagcagtcaataaaggtttgtgggcctgcagtactggtgacagcaacaccctgagcaaggttctaccaggtgtatctttcctcttgcgtatttctaccctaaaagcataaattcacagtgtcactttttaaaggtaagggagctaaacactattgcacagtctgtctaccccactaaactgtgagctccccagacatcagggaactgagtcccactcaccttcatatcatcaaggtttggcaacctcagtgtctgtacttgatgattacctatgtggcaagtgttcagataattagtgcttccacaactagggagacagctccaggcaagaacagaaaaactttttgttcccttgtgacagagatccttccacatggttactcttcctctctcctcccgtcaaaagaaggagtggattatcttttaatcctccaagagatccagtttcctcctcatacctctatactgtaaagacatctctctctggttcagcacaggaagtcagtcacaatgggagagtgatgtgtatggatcagagaattgagacactttattttttagattcttattctgtcatttccactaaaccaagaacattctgaggacagggatcaggtttgattcatctattgccattgttacttgcctattaaatgtttactgaaatcatgtgtttaatctcaaatacaacatagattaaaaaaaaaaaaaaacacccagctttggcacctaatcccaggactgggttctaaacagcaagtgatattttaacattctaaacccacctacctgaagcaagcacatagcattacagagtatgctttttttttactgtcctcactccctgaatccattttacaccctggttcttgctaccaacttaaaaaatagtttattttctaactataaaagtaacatttgccaatagcagaaaacttagaaacaaaagctaaattatggtaacaaaagttaccataatttcatgattataaaggtgctagagtggctactactgtttatggagcatttgctatgtgccatgcaccttgctaaacactttgtattatctcaattaaacctcacaacaggtacaatgtaccacccaccactttacaaatgtgaaaactgaagtttgaaaaacctaagtaagtttgttagctcatagccacacagctaagtaagtggtatatttggaatgaaaagccaggttgttggactgtagaatgtgagttcttaattactatacaacattattaaatttctagtacatgcttttccattttgtcttttacctacaccatatatggtatattagagtttttggtgttttttgttgtcgtttgttttttgagatggagtctcactctgttgcccaggctggagtgcagtggcacaatcttggctcactgcagcctccaccccccaggttcaagtgattctcctgcctcagcctcccaactagctgggattacaggtgcccgccaccatgcccggttaatttttatatttttagtagagatggggtttcgccatgttggctgggctggtctcaaactcctgaccacaagtgatccacctgcctcggccttccgaagtgctggaattacaggtgtgagccactgtgcctggaccctattagagtttttaaaaattttgtgggggggatatgtcttggaatttttaataaatcccaaaatgggaccatatagcacatgtttttgtaaacagcttttgttttctctttaatatattaagaacattttaaaaattatattcttatatataatatacatatattaattaaaaatgtttagttatatatgcacatataagaacatatattcatatatatgagaatatattaagaatatcttcccatggtattaaaatgctgtcataaaactgtttattcattcaatatatatttacctatgatgtgccaagcacgagcccaggtactgaggataaagcagtgaacaaaacaaagtttctattctcaagtaatttacactttggtagggtggacaacaaaaacacacaaatatttaatacctgaggtattaatactataaagaaaaagcaggtaagatggaaagtagaataggaaatgttatttttctataagatattctatttgcaattataaaatcagtatttagccaatctcctattaacatttagatttctaaattttcgctaatatgtactatactgacagaaacatccttttatatctcctatttgaactctgattatttcctgagattgcatttttaaaagtaaaaatgcatctttacttttaagactgatactgttaaactgccctccagaaagactagagcaattgataccatcattaccaatataaaaaagcaacaccatcggcagtgggtattacttcaaaacaaaactgtgataatttaacagcaggaaacaatgttagtagttaatctgcattttaaaaatcaaaccattgtttacattccaaatggtttcccaagtttatcatcatctgctttttttttttccagttttttgaattgttataaggtcaaatctgccaatctttgtcctttttgtgtgtttttttttaatatgagatctctctctgccacccaggctggagtgcagtggtgtggtgatcacagcctttaactgcagcctttaactcctgggctcaagcgatcttcagcctccctagcagctaggactacaggtgcagactaccacatcccactaatttaaaaaaattttttttggtagagacaggatcttactatgttgcccaggctgggcttgccttgcttttatatgcttagagcacctattactgtagtaatttgtattttttttcagatctccacttaaacttcttttgggaacacaatgatttaaacataaaaatccccacctatgtattctctaacaagtagatcattttcaaaagatgctgagcaaataagcagctctatcttatatccatcttctaacactgtgaaaaagccaacattaaaaacttatattatccaattctataaaaaattgtaagggttcttacctcgacctaaaacacaaacagccattaagttggatgaatagtaagcagaatggaatttcagtagctcttgtcttacatcaatgccttcttggtttggtctagtctccagagtatatttgttacctggaagggaagaaaagggatttcttagaaaaagcaaaatatgtggacttttaaagttttgtaattatcactgatattgcttaagatgaactttaaaaataaagttctaatacacagaataactcaaatttatttgaatgttaagtgaataaacaggataatagagtacaaaccagcaacattttaaactatagtcgtctctacggaattaaaagtgtcttttttttttttttttgagacggagtcttgctctgttgcccaggctggagtgcggtggtgtgatctcggctcactgcaagctccgcctcccgggttcacgccattctcctgcctcagcctcccaagtagctgggactacaggcgcccaccacgacacctggctaattttttgtatttttagtagagatggggtttcactgtgttagccaggctggtctcgatctcctgacctcgtgatccgcccgcctcagcctcccaaagtgctgggattacaggcatgagcaaccgcgcacccggccttttttttttttttttttgagacggaatttcgcttttattgctcaggctggagtgcaatggcgtgatctcggctcaccccaacctccgcctcccgggttcaagtgattctcctgcctctgcctctctagtagctggattacaggcatgcgccaccacgcccggctaattttgtatttttagtagagatggggtttctccatgttggtcaggctggtcttgaactcccgacctcaggtgatctgcctgcctcggcctcccaaaatgctgggattacaggcctgagccaccaagcccggcctaaaagtgtcttataaaaattatacttttggccgggtgcatggctcacgcctataatccaagcactttgggaggccgaggcaggcagatcacctgaggtcaggagttcaagaccagcctgacaaacatggagaaacaccgtctctactaaaaatacaaaattagccaggcgtggtggcacatgcctgtaatcccagctacttgggaggttgaggcaggagaatcacttgaacccaggaggcagaagttgcggtgagccgaaatcacgccgagtcaagattgtgccattgcactctagcctgggcaacaagacggaaactccgtctcaaaaaaaaaaaaaaattatacttcttggctgggctcagtggctcacatctgtaatcccagcactttgggaggccaagatgggtggatcacctgaggtgaggagttcaagaccagcctggccaacgtggtgaaaacccctctctattaaaaatacaaaaattagccaggcatggtggtgggcacctgtagtctcggctactcgggaggctgagggatgagaatcacttgaacccaggaggcagaggttgcattgagccaagattgtaccactgcactcctgggcaacagagtgagactctgtctcaaaaaaatatgtctatatctgtatctatatctccacttcttaaaatccctatgagatagtaggtattatgagtgcttaaaagacaaaataagatccacatggcctccattcatgcttattttaattttcaattccctatgtactccataattaattgaacagagtcactgagggatttttttagaacttgccaagttacttgtggaaagaaatttactattttgggccaaaccattaaatttgtgatgtgaattctcatagatgtgatctagactggttaaaaaaaggatgcaatgctatttttataactctccagcgatgtatgtagtgtaccactaacagctctcatgaaatcttaataactaattcaagtagggtaaaatatgtaagtcaaaaacaaatagtcaaattctctaaataataccttgcaaattagggactgggagatgaaattccaatgatcggtgtctctccaaaatggcatcttgactggaaatatcctaagatcctggcataataacttttattattggttctacttacactactaagtgagatcctgtctttcttctgcagagataaaactatggtagagtatgttcttgaagtggtttaatttttttttcttgtgtttttataatatctgatataggggcactgggaaagtccctctttcatgaaattggatgtctacagaaagccaccagatggcgctctcaaactcagtctttagctcagtagtgctgcacagtactaagattcctgtcccagaatgcttaacagatccagtgaagacagaatgtgcaagaaacagcctagcaagtaaccttaaccttaactcattaaccttttcctagtcacaaagtaatcatatgcattcatactcactagaagtagcctatcacccaagtttccaggttgttcttgtttttgtttaagatagggtcttactctgttgcccaggctagactgcagtggtgtaatcacagctcactgcagcctcgatctcctgggctcaagcagtccttctacctcagcctccagagtagctgggaccacaagcatttaccatcacgtccagctatttttttaattatttttattttttttggtagaaccagggtctatgttacccaggttggttccaggttcttaattagttctctcattttctcactaatgaccagttcaagctgggcacagtggatcatgcctgtaatcccagcactttgggaggccaaggcaggtgcatcacttgaggccaggagttcaagaccagcctggcaagcatggtggcatgcctatcatcccagctactcaggaggctgaggcatgagaatcacttgaaaccaggaggcagagactgcagtgagccaagatcacaccactgcactccagcctgggtgacagagtgagactctgtctgattgattgatagataaataaaataatataaataaataaataagacctagttctgctttactgcccagagaggtcctgagacattctctattctctcactctacctgaggggtccagatgctcttaggtgcatacccatagtcctaactccttagggaaaaaaaaaggccttttgctggagaatgtttgaagttctctcgtatcaaggtgaaatttgagtattgatgaagcctttcttttctactaaatgaagattctaaaagccacagttctagagggagttttgcttaagctccttagtgctttacactgccatctcggctcactgcaacctccacctccaagattcaattgattctcctggggccagatatcttctgactgcatggccttgaacaagttactttacttctctgtggctcaatctcctcaactgacattagtggacttacagtacataatgagaaaaatacacgtaaaaaaagtataagactattacttaacaaaaatgttaaagtcttacgacaccaactgttgtttagtatgcagagaatgagaactcagacactgcctgatggagtgcatcttgaatcaaccgctacaggaaacaacctagtcaatctgaagatgtccatatcctactacatagtaattccactcctggatatatgtatccagagaagtctgtgtacaaggagacatgtacaacaattccatagtaacactgtttcattaacaggaaaatgaataaatagtggtacagtcattcaatgaatttttcaaagagcaataaaatacaaaaattatcagaggaatactcatcaatatggacaactcttacaaaacaaaatgttgaatgaaaaaatacaagcggcagagattacacacaataaaatactatttccatgaaacctaaaaacatataaaactataaacacggaaatgataatcattaaagaagatagtggttatctctcaggagcaggaaggaaaatgcaactgaagtgtacaccggatgctcaaagtgcatttgtaacgttctctttctttaagcagtgtgacagagaatgatctggcaaatgtctgtgtacctacctctttgtatgacaactacatcataaatctgtaaaaatactgaagtatttaacataatacttaataaataaacaacggaaaataaacaacaaacagtagctactgctgttacaatttgaattgtaggaaggactcttggcttctgagtgaatcattatacaaaaagatgtactccccagagaaaaaaatagaaattgtggctagaagctgagtaaatggtccagatgactgccccccaacacctaagaaaccatgtatggagaacaacgtgaataaggctgggataataaataccaattcagtctctagacacatactgtcctaattttgtgctcattcagctgggtcatttatgtcaaattaaaatgctgctacttgtactaaaatcttgaatcctacctttctggctctgttgcatccaggtgagctccagcagtgaatggaggagcagggttgctcacctactgtgacccttccactctacgcctgctaggagagaacactgccttggcatttaggaattcagggattcttgtcctgactccatcatgtgctaattaagcaaccttggaaaagtctccaaatatctccaaggggtcatttatttcatctgtaaaatagggataatatggatatatgtccaggtgctaaaagcaaggaaaggctcaatccctgactctccttcatttcctagctgtgagacacaggcaggtttcttaacctctcttacgcctcagtttacttattcataaatgggcataataagaggaccaacctcacaggattgctgtgagaattaaaatataaataatctgccaggcgcggtggctgacacctgtaatcacaacactttaggaggctgaggcaggcggatcacctgaggtcaggagcttgagaccagcctggccaacatggcaaaaccccgtcctactaaaaatacaaaaattagccaggcatggtggtggtcacctgtagtcccagctactcggggaggccgaggcaggagaatcgcttgaacctgggaggtggaggttgcagtaagccgaaatcaagccactgcactccagcctgggtgacagagcaagactccatctcataaataaataaataatccatgttaaggctcagcatagcatctatcagacaataattactgaatattaacatggggttttgtgaagcctaagaaatgtaataatggatgcgaagaggggttggtaaattgtaaaatccagtaagtgctactttatattttcattttaacaactattttaaattctgtttagaacaaataaagcttacaaactcagcactaatgtatatgaatactgattttcaagggaataaaatttattttcctggaaaattctgaagccagcaatatatttcttatactgggaaggaatgagttttaagttttagaaacgtcttagaaaccacaggtttctccaatagtatgttctcagggaaaggtcaacttgatagttataacccattataattttatatgttctctgaaaacccaagatcctgaaagttaggctaacatacctatagctagttacttggaattattataaactttttaaaaagccctttcttcttgctatagcaatcttctaaaaatcctggaagtgagagactaaagccttttgatatatgtgaattttcccacaaaatttaaaccgacaattcctctgcagctgagtaagtatatgcaagtacaagatatgagttataaaaggggactttaagtgaaaacctcttaaatgccatcagaaaacactcctacacttgattggtccagctcttgttttcagtaaatttctagttttccacagacacatatcccagtaacgagaaaaaagatagtaacaaaatccatggaaaagctaagggaacaataaatgattacatggactaaaatatatgaaatgtttttacatccatgagtctatgtgatactcaaaaaacaaattagtcaccctgaaggatgctgacgaaccaattcattattttgaaaattggtaaataaatggaatggaataaaagcatttatcctgcctttcccacagtaactgtaccactgactagccaaatagtagaaaaggagattttacagcagtactcaagttaatcaaaagagatggaataatagaattagcattagaaaaaccaaaattagggaggtgatgcactgagaatcaatatttgcaacatcataaatgaccagacattgtatgcccaatggaaaaatacatcaccacctatgaagatgtcttgtcaaaaagtcaaacacaaatttgatcaagcctctatatccaactgccaatttgtagaaatacagaagacagaggaacttgttaaactacattgttaggggtgcagtaaaaaaaaaaaaatctaggctatgagaagttcgataaaacaaacaacctgattattcaataaataaattccaagaggggagtgaggggaaggagtagaggaagagatgaaggatgaactcttaaactaaaaagagacttaaaagacatatcagactggagtggtggctcactttgggtgactcactttggggtcctagcactttgggtggtcaaggtgggagaatcgcttgaaactaggatttcaagacaagcctggacaacatagtgagatcctgtctctacaaaaattaaaataataataataataataatgaaagacatatcaaacaatcactaatatgtaatacttatttggactctgattcaaataaactttaaaaataatgatttttataagaacactagaaatttgaacactaactggatatttgataataatggtaacaataatggtatttttatgtttttaaaaatgaattgctatgttttagagatatatactgaaatatttatgagcaaaatgatatctagaatctcttcaaaataatacaaaagggtgaatggaaatgtggattgtacagaattggccaggggcagggtgatgcacacatagggtcattatagtattttgtgttcttttgtgtatgttttaaattcttcacaaaaaaaaaatggtgaagggaagaaaagaggaaataagggtgggagggaagagagaaaaaagtaattgaacttgtattagagtctgatttggtgtgttattatgtttaccacaggatcaggagtcactgaactaccctctggttcatattccacaattttattgggttctctttttctattctattccttcctacttctctatgcaaaagcatcctttgttatactcaaactatcctaactcatgttctccaaaagaaaccaggctcactccttggtcttttcttcatgtcatggttttgggggtcaacttaattactatcatgaagaacataggctttgagttcagactgacttgataattgaattccataacctatacagatagttccactaccaccctatctctctcctctctgtactccctgcaagactaaaacattagtcaaatacaacaaatattagttccttttctttttccccttgaatggctcttccttctgcttaaggaaatcttatctatacttcaggagaagtgaaactgcatctccgctaagatcctggagaaataaattctgggcaacactaaaacatgcaaaatagaatagtgtttaaaagctccaaatctgggcacagatcctgactccagcacttaaaagctgagggacccaaggcaatttaattatcttaagtcttaatctactcatgtaagatggaaatatgagcatctacctactggggttactgtgagaattattagaaattaaataatccacgtaaagtgcttagcatagcactcaataaaaattagcaagaaaaaggaggaagaaaatggagagatgatgatcctggaaaatcaaagctaaaattacactcagtgaaatcctgggtttgccttgcttccccaactaaactttcagcaccttgagtgcaatgacactagttacacttctttgcattttctaatgcactttacatgtagggggactaaaaaaattacttattaactgagagagagaaaatttgggctcatttatatttataatcctatgaacttggaataagcatactagagtaaatagcagcggagtcaggcagatgacctgagctcagaagttcgagactagcctgggcgacatggtgaaaccctgtctctactaaaaatacaaaaactagccaggtgtgatggcacctgcctttaatcccagctacttcagaggctgaggcaggagaatcgtttgaacccaggagatggaagctgtagtgagccgagatcatgcgaccgcactccagtctgaatgacagaaggaaaccctgtctcaaagaaagaaaagaaaagaaagaaattttctttcttttcacttgctgggcacagtggctcacaccataatcctagcactctgggaggccaaggcaggcaaatgacctgaggtcaggaattcgagaccagcctggccaacatggtctctacttaaaaaaaaaaaaaaaaaaattagttaggcattgtggtatgtgcctataatcccagcaacttgggtggctgagacatgataaccacttaaacctaggaggcggaggttgcagtgagccaagatcatgccatgtcacttcagcatgggcgacaagagtaagactcagtcttaaaaaaaaaaaaaaaaaaaagtcacgcacacctaaaatacagctccaccctctatattcttgtcttcaactgtgcctttcattctacctatacatgaaggagtacctgttttgttgttcccactcactctttgacctccttcttttatttccctcccagctgaataaacccagttgctcccacagtgtcggtagagttatgtttggagaaacagatcagtaaggaataaccagaactaagtttttccttttactattctaaacctgcttgtaaacattcaactgctcctactttaattccattgagaggcaaacaaaaaaacaaaatagggcagaaaaatggtttctagtttatcaggaactatgaaactaaaggcatatgtgaataatgaagagaaaaagtgaaagtggataccaactaaattcaataacatattaaaaatatcattcaattcacaaattagctgggcatggtggcaggcatgtaatcccagctacttgggaggctgaggcagaactgcttgaacccgggaagtggaggttacggtaagctgagattgtgccactgcactccagccttggtgacagagtgagactctatctcaaaaaaatatatataatatattattatatatattatattatatataatatattttatattataatatatattatatataatatattttatataatatataatatatattatattatatataatatattttatataatatattttatatattatatattttatataatatataatatatattatattataatatattttatataatatataatatatattatattataatatattttatattatatatatattttatatataataatatatatcattcaacatgatcaagtgggattcatctcagggatgcaaagatggttcaacataaacaaatcaggctgggcacagtggctcacgcctgtaatcccagcactttgagaggccgaggtgggtggatcacctgaggtcagaagtttgagatcagcctggccaatatagcaaaaccccgtctctactaaaaatacaaaaattaaccagatgtggtaatgggcgctgcaatcccagcttcttgaaaggctgaggcaggagaattgcttgaacacggaagttgcagtgagccgagatggcaccactgtactccagcctgggcgaaagagtgagactccatctcaaacaaacaaacaaacaaaaatatatacaaatatatacaaatcaataaacatgatacatcacagggtcaggtgtaatggctcatgcctgtaatcccagcactttgggaggccgaggtgggtggatcacttgagatcaggagttcaagaccagccttgccaacatggcaaaacacagtctctactaaaaatacaaaaattagccaggcgtgtgcctgtaatcccagctactggggaggctgaggcaagagaatcacttgaacccgggaggcagaggttgcagtaagccgagattgcaccattgccctccagcctgggcaacagagtgagactgtctcaaaacaaaataaaacaaaaacatgatacatcacagtaacagaatcaaggacaaacaccataagctgaaaaaggcattcaataaaattcaacatcacttcatgataaacgttctcaacacactgggtagagaaggaacatatgtcaaaacaataaaggctgtatatgacaaactcagagctaacatcatatggaacagcgaaaaagtgaaagcctttgctctaagatctgaagaagacaagcatccccacttttaccactttatacagcatagcactggaagtcctagccagagccattagacaagacataaagggcatccaaaatggaaagaagtcaaactgtcattgttcgtagacaacataatcttatatttagaaaaacctgaagactctatcaaaaacacctgttagaactgataaatgaattcagtaaagttgcaggatacaaaagtcagcatatcaaaatcagtagcatttctatatgccaacagtgaacaatctgaaaaaaaaaaaaaaaaaaccaagaaagcaatcccatttataatagctacaaaaaacaaaaaacaaacacacaacaaaaaagccctctaagaacaaactgaaccaaaaaagtaaaagatctcaggctgggcgcagtggctcacacctctaatcccagaactttgggaggccaaggtgggcagatcactcgagctcaggagtttgagaccagcctggccaacatgcgaaacttcatctccactaaaaatacaaaaatcagctgggcgttgtggtgcaagcctgtaatcccatctacttgggaggctgaggcagaattacttgaacctaggaggtggaggttgcagtgagctgagatggcgccactgcactccagcctgggagaaagagcgggactccgtctcaaaaaaaaaaaaaaagtaaagtaaaagatctctacaatgaaaactataaaatactaataagagaaattaaggagggcatacacaaaaaggaaagacatcctgtgttcatggactggaagaactaatattgttaaaatgtccatactatccaaagctatctacagattcaatgcaacccctatcaaaataccaatgatattcttcacagaaatagaaaaaaaaatcctaaaatctatatggaatcaagacaaggactttttcagaatcctactgtcctttcacagctaccaatcaggtattatactattaatatgatttatttaacattattatgggcttcatatgcacaatctcatttaatattggcatcaacctgatgtggaaaggaactggggcttagagaagttaagaggctgggcatgatggttcatgcctgtaaccctagcactttgggaagctgaggcaggaggatcacttgagcctaggagtttgagaccagcttgggcaacatagggagaccctatctctacaaaagattaaataattagctgagtgtggtagtgtgtgcgtgtagtctcagctacttgggaggctggggtaggaggatcatttgagcccaggaggaggaggttacagagtgccaagattgcaccactgcattccagcctgggcaacagggtgaggccctgtctcaaaaaaaaaaaaaaaaaaaaaaaaggacagggtctcactatgttgcctagactggtcttgaacttctgggtgcaaaccatcctcctgcctcagcctcctgagaagctgcgattacaggtgcataccaccacatctagctttttgtgtctcttttgaacaaggattttaaatttcaatgaggtcaagtttatctctaaacctatggttcatctctatcttcatgggtttttctgtgtgtttaagaacatttcctctatctgaagataaaaaaaattctcatatattttcttttaaaagttgtagcgaaccagactcagtggcacatgtctgtagtctatagaaagtctacataaagtcctaagaaagaactatatttttttcatttgtaatgtacctctgccttatatcaagtttccatatgtttgtggatgtttccagggcctataatctgttctacttgtatcttcatgcacccctgcttcaattctactactgtaacaactagaactttataataagtcttggtacctggtagaagtagctttccttgttcctcaaaattatcttagctattcttggccttttactctcttattaattttataatgagattatacaattcctaaaaaaaaacttacaggactttcaactggcactgcattgaatttagagaaatttggggcatatttacatttatgttatatagagtttaaccatccatgtgcatgatatacctccccatttaggcattcttttatatccattacatatttcttgcaactctttcattggatttatttctgaatattttacagctttgttaaatattgcaaatgaaataatttttaccccagcattttcctgtaattgattattgatacaagaacatggccgggcacggtggctaatgcctgtaatcctaacactttgagaggccaaggcgggtggatcacgaggctgggagatcgagaccatgctgactaacatggtgaaaccccatctctactaaaaatacaaaaaattagctgggcgtggtggcacgtgcctgtaatcccaactacttggggagctgagacaggggaatcgtttgaacctgggaggcggaggtggcagtgagccaaggtcacgccactgtactccaaagaacgcaattttagtgtgtttgtcttctttctggcaaccttgctgaattatttttaatgactgatctgaagattttcttcagtatttttatggaggcaatcctatcatatggaaataaggaaataggttttgttgtgcttcctttccatctcttataatcacattttcccccttgatttattgtaatgattaatacctgtaagtatagccaaacaaaagtgatagtgggcatccttattttttcaacagaaatcctttgaaacctccattaatcatgaagtttgacaatagcttttaatcagcttgaaagttttttattgttgtggtttatttttgttcatggatgagtgctgtgttttatccaatgctcagagtctactgtctatcactttggactactaaaactgtgggtcaggacccattatattgtaattaaatgcatttaaagtattagcagatcagagtttctctagaaaaaaaaaaaaacagaatataagggaaagtgccagactacatcccatgatgtaagatagtgtttgacaaaattttgtttcagctgcttacacaaacacatatatgtactctgaattgctaaataaaatgtgcttcttactatgagttgtatacaaaaaagagtttgaaagccactaatctatactatttctgagcatgaaaaccgactgttagggacaaacatcttactgtaaagttttcttaaaacagataatacaatgtgtggtttttattcattcaaaaatacacacctttttctggtattattattttaaatcaaaatcccttgatgagaccaggcgtgatggctcatgcctgtaatcccagcactttggaaggctgaggcgggcagatcacttgaggtcaggagttcgagaccagcctggctaacatggtgaaaccccatctctactaaaaatacaaaaattagctgggcatggtggtgggtgcccgtaatcccagctactcagaaggctgaggcaggagaatcgcttgaacctgagaggcagaggttgcagtgagccaagatcaccatactgcactccagcctggacgacagagcaagactgtctcaaaaaaaacaaaacaaaaaaacaaaacaaaacaaaaaatcccctgatgaacaaagtggcccacactcacaaaaacatctgaggccaaagcaatctacataaattagcatgaatttctgacaaggaacctactgcaacgatcacttttgcaaagttttcaatatgcataatatctgagataagggcatacaactgtcatcaaattttcaaatgtacctgtgaccttaaaaatacacagaacttctactccaaaaaattcaacgtaagtttataattctaaaatcagaaggtaacttgacatttgcattacttatatcacattttctgtactgtgtattgagtctggctcacttgtttctcagctgtttatattaccttgtactttgctaactgcctagcttttcaggctataaaaagaaatatgccctgaaacttcacccatatggatatgccatgcaatgtatctctttgcccatcattcctgaaacccttctatagaatattttaagattgttcttgtggccaggcatggtggctcatgcctgtaatctcagcactttgggaggcgaggcaggaagaatacttgaggccaggcgttcaagaccagcctggtcaacatagtgagaccccacctctacaggaaaaaaaaatgttccttgtttgtgaccagaagtaacactactcaccttattcactggatttatttctggaaaatgtgtaactgctttctgattatgctgattataatttgtcaccagtgaagctatttaaaaaaaggcaactcccaaagaggagctccaacatattctgcaaaatagcagcattgtttgtgtaagtatctaacataccaaaaggactactttaaataatcgccaggcgcagtggctcacgcctgtaatcccagcactttggaaggccgaggcaggcggatcacctgagatcaggattttgagaccagcctgaccaacatggagaaaccccgcctctactaaaagtacacaaattagccgggcatggtggcgggcgcctgtaatcccaggtactcaggaggctgaggcaggagaattgctggaacctaggaggcagaggttgtagcgagctgaaatcaggccactgcattccagcctgggtgataagagccagactccgtctcaataaataaataaataaataaataaataaataaccatttgaatgtaatgcttttgaaaaaacaaaaaaaaagttgttgttttttttttgagacagggtcttactatcacccaggctggagtgcagtgactcaattgtggctcactgcagttgaactcactggctcaagccatcctcagcctcccaggtagcttggactacaggcacacaccaccatgcctggctaattattttattttcttgtaaagatagtgtctcactatgttgcccaggctggtctcaaactcctgaactcaagaaatcctcccaccttggtcttctaaagtgttgcagttacaggcatgagccaccatgcctggcctgatatttgttttttaaaactcacattccattcttgacataccatgtatactgatgttctccacaaaaatcactttttaaaaaattcagcattatgtagacattctaagaaccacactattcatcttggcaattatgttaatattgagtgccaagtaccacggttctaaagaatataatatcactgcttcaaagtataatttttgaaaactcctaattctgtaaagctatgctaatttctctgactgctgttggatacattaggatgatatccaaacttaaagaaagttgtctttatggttttaaaaagttcccaaaactaatttataaaataagcatgttctcataatagagaagtgaatttttaagcataaatttctaagtacattaaataatatattatcattattcttatgtacttttataatacccaaaacagtattttaaaagtatagcaatctgttaacaatgattacctctggtgagcatgactggcaggaatagataaagaatagacagactttgtgtttctgcttttatttttactctaaatgcttttgtactgtttaaatatttaaacaagtacttttttaatgaaaaattgaagaaaaaggtacaattataaagtcaagagtctccacgtttatcttattctacttcctgttatccccatttcttatctccctctaggagattgtagcactttaagagctgggatcttgtgtgtcttctacagtgtcctatctcccacagagctaaccccatagcagacgctatgcatctggattagcagaagtagaggcaatgaggacaagtggattcaacaatactacagtgagcctttacaaaaaaaagtactttggaaggtaggctttggaataaaagaatctattatcttctccatatggaatgctggttaatatctattcacaactctaactgctctgctccttaaacgtttagaaccctatttgaacaggatgtaagtagaaatgtggaattttgaaatctatcctgaattgtaaaatatgccatgaactgtatatgccatgggttatatacataaatatatacataaatatattttatatatacataaaatataatactatgcagtggccatgggtttaaatgaggtcaaggaaagcagctgttgacaaacctgtcccaaatttactgaaggggtgtttaggattccctgtagctttttccaattgaaagagtctccaggcatcattcatcacattcttctcatgttctgaatcaactgcattcacctctctgtctttgcaactttcatcgaacaaggggcacagaaaaaactgtgcaaacctaagggtacgaaacataattaaaacttgaaagatgtcattttaaaacaatagccttttagaaagatttttggaacttattagataggaaatgtaaattttgcagaatcagaaacaaaactaccattgctactaagaaaaaaggagtataaaataagtgctatgtaacagaagaaaaatctaatgttgaacagaggtaaatgcagaggagttgatctaccccagagatgataaacagtgaaaatttaaaaaattaacaccaaaaaaggcagattatggacaatagcagtctatttaagatttttaatttggtacgtctataaaaactttgttacatgtggctaatgctccaaaaaaaaaaaaaaagagaaagaaagaaaaaggcaggtcatagtttttaggccaatcttaaatttacagttttaggtgcaatttcacttagactcaggcaccttaggacaaacaagtgacctacttttaacaggctcaatttgaatatttctttcttcttatgtagaaaaacaaacttgaattagtaggaaaaaacataatgcagtaaaaaacctgaggtatgacatagtttgactaagccatgattatgggcgtttatgaaatcataagagaaaaagtccataaaattttaataagcagtgattcaataaataacatggtatgtaactttaacataagtaaccaatatgcctttcttgaggctattccttaataataatacctaactttaagatacctacagctaataaattaactcttctatatcaggttgaatttaactcatgattcctgtagtaattcttaagaaactttacatcccattttatagaataagacttgattcagatgaagctaagagcagaggctctgaataggactactttattcagtgggcctaaggaactcttgggtccataaacatctcagttactacgcctcacagtccagctgtcacagaagccattatcattacttgttatttactttaagtgcataagaaaatatgatactatgctaagtactttacatataccacaaggggaaactctatctatctggagtctataatcaaagatgtatgaaaacagatgatttctggtcacataacatcttttacccacctcaatacttccaggctgggaaaaatgtctaatagctacataccaaagctggataggcccagataaaggatcatgttatgacacagtataataaagttttttaaatgatcctcttatacaagtggatttttagtttgagccaagtaacagacatcccccatcatacagagatctattatatgaacatctgctgcagcatttgtaaagcaagagatgaaattcagtgtatgatcccagggaactaattaatggaagtcttctgggaatacatattagcgatgattacacctcaaagctgctgcctaaagactgaaacataaaataaaataagtaggaaacagactactttggcccagcacatctcataaacccataaccttgccttgataatgttttttcaataatataataactattattaaaagtaagcaaataaagccgacagtgactaaaactgccaaatttcattatagatccaaaaagttgcagaattacaccttggcatcacagaaaactataaatattcaccaaggataaacaaataactactgcctaccataatgctttggactaccagagtgtagtccattatttgagtcaaataatgaatcaaatcactgatgcaacaaaaaaattagaaattgttagctgtataaaaaattgaccaaaaaaaaaaaaaaaaagctgaccaaggctgggcgcagtggctcatgcctgtaatcccagcactctgggaggctgaggtgggtggatcaactgaagtcaggagttcgagaccagcctgaccaacatggtgaaaccccatctctactaaaaatacaaaattagccaggcgtggtggcacatgcctgtaatcccaattactcgggaggctgaggcagaagaattgcttgaacccggaaggcgaaggttgcagtgagccaagactgcaccattgcattccagcctgggaaacaagtgcgaaactccgtctgaaaaaaaaaaaaaaattgaccaagaaattaaatcatcctaatggagcttgctccagaaaacattcaaaatatccccacggttgaccaagaaattaaatcggcctaatggagcttgctccagaaaacactttcaaaatatccccacggttgaaacagcaggtcaaaacgttctgtatctactaagcatccttgagaagcaaggaaatgaacgaggagagaatatttaaggtttagcattctggaacagaagtatgtctgaaaagagatcaatgacattatcacaggttagtcctcatcacatgctttatatgtaacaccagttagaatggaaagggctgctgaaaattctatacctcaataaaatattttgtaggcctgaaggctcatttaaaatatgacatcactcattttttctttttcagaaaacacagggaaaaacactgtttaaaataccttttgttaaattatgaagccatctctgtggaaataataattattattattaatgtgataagtacacaaagttggataattcatagggtattctgcattacctgtctagggcaccttctaggtgttcatgagaaacatcaaaatagtaattggtatgctctccactagtaaaggcatttgaacttcctgcatgctcactgagaaactggctgtattcattttctttagggtatttctttgttcccaaaaaaagcatatgttcacaaaaatgacttaagccagcaatatttggaggatccgacaatgaacctgaaagagaaaacacgtatataataaatcattgtcctatgctgaaagttagtaagtacaggtgatttgtagttcttgttagcatgacaactccaactatataatcagagaaagttaagcacaagctacctaaaatgatattatttagaaagtaaatcagtagtcagaagactggtttctagtgcctgctcttgacgctaattagttggtaacctcaggcaggttacttagtgtctctgaacattagtttccccacatgccggagaggaagaaagagctggattcacagttttaagaggtaaaattttctttttatttatttatttatttatttttgagacggagtcttgctctgtcgcccaggctggagtgcagtggcgagatcttggctcactgcaagctccgcctcctgggttcacgccattctcctgcctcagcctcctgagtagctgggactacaggcgcccaccaccgcgcccagctaattctttgtatttttattagaggcggggtttcaccgtgttagccaggatggtctcgatctcctgacctcgtgatccgccagcctcggcctcccaaagtgctgggattataggcttgagccaccacacccagcaagagctagaattttcttgtcatgatttcattgcaggagactatacagcacagtgttaacagcatgcgtttgggggttaccactctactggctgtgaaacggtaagcacaatactgtacctatcttgactcaatcgcttcaatatatacccatcttacagggctgtgtgagtacaaattagatgacatatgcaaatcaccctggtagtctaaggcattatggtaggcagtagttatttgttcaatattaccttatttcttcagttctaaaatgacactgagttaaaagtttttcaaagaggacaaaaagaaacactgtcccactaactgtacacatacataaaaagcaactcggccaggcacagtggcccacacccgtaatcccagcactttgggaggacgaggtgggtagatcatctgaggtcgggagtttgagatcagcctggcctacatggcaaaacctcgtctctaataaaaatacaaaaattagctgggcgtggtggcgggcgcctataatcccagctactagggaggctgaggtaggaaaattgcttgaaccttgaaggtgggggctgcagtgagcggagattgcgccactgcactccagcctcggcaacagagtgagactctgtctcagagaaaaaaaaaaaaagaagcaacctgattaaagcaacattaaatgtgtaagaaatgtgcccatggcagggcatggtggctctcgcctataatcccaacactttgggaggctgaggcgggtggatcacctgaggtcaggagttcgagaccagcctggccaacgtggtgaaacctcatctctactaaaaatacccaaattaactgggcatgatggtggacgcctgtaatcccagctactcaggagggtgaggcaggaagattgcttgaacctgggaggtggaggctgcagtcagccgagatcacaccactgcactccagcccggacgacaacagtgaaactccgtctcaaaaaaaaaaaaaaaaaagaaatgtgcacacaaggctgggagcagtggctcacgcctgtaatccctgcactttgggaggccgaggcgggcagatcacctgaggtcaggagttcaagaccagcctgaccaacatggagaaaccccatctctactaaaaatacagaattaggcgggcgtggtggcacgcgcctgtaatcccagctacttgggaggctgaggtaggagaattgcttgaacccgggaggtggaggttgcagtgagccgagatcacaccattgcactccagcctgggcaacaagagcaaaactcccactcagaaaaaaaaaaaaagaaaaaagaaatgtgcacacaagaacctatgaaatatggtattaggccaggcacggtggctcacgcctgtaatcccagcactttgggaggccaaggcaggcagatcacaaggtcaagagatcgagaccatcctggccaacatggtgaaaccccatctctaataaaaatacaaaaattagctgggcatggaggcccatgcctgtagtcccagctactcaggaggctgaggcaggtgaattgcttgaacccaggaggcagaggttgcagtgagccgagattgcgccactgcactccagcctggcgacagagtaaactctgtctcaaaaaaaaaaaaagaaaaagaaaaaggaatgttatattaaatgtaccacggtaaaaaaaaaaatcataactgttactgtaaagaatggcaatgaatttttgctgctaggtcaccttaggtgggaacctaacaagatgtccttagaaaatgtaagattatttgactgaaacaactgcagtttaccaatagctttacgagggttctggtataaaataaggtacatggaaccggtaactattgagtatttaaacacgtatggaaagttctaataaatgtcagcattaggtcaatgaaacaaaacaaagcttaattcacaattttcaattgtacctatgtgcacatcaagtgctgctgatgacttatccgtggtgggatcactgataagaagtactttgataccattggccagctctagccctcgatattctcgcttgtcttcaggagacttggtaatgtgatttcctattctcttgatggctggattattcattttgctgtaagtctttttttggaaactgaaaagaaagagatttttaattgttgatttgtgactttatatttaaggacaaacaataacgtcaagtaaacccatataatacatcatcagatttttctaaatgctgaaggaaaccttttatagccactctacagggtgcagtcattcctttcctccctcttacccctcattctttctgagaaatgctaacaaaattgttttcatggagccatatttgtatctgaaagagcacatggatagggatttgagatagggtgggttagaccatgtgttggcctgtatgcagaactagaatagagttttttttgctggttttgtttttgtttttttgagacagggtctcagtttgtcaccgaggcttgtatgcagtagcgtgattttggctcactgcaggcctcaacctcctgggctcaagtggacctcatcctcctgtctcagtccccccaagcagctgggaccacaggcactcaacaccacacccagttaattttttgcattttttgtagagatgggatttcaacttgttacccatgctggtcttgaactcctgagctcaagccgtctgtccacctcagcctcccaatgtgctaggattacaagtgtgagccactacgccccgacctagaatagagttttatttcacactatttcagaggtatctgctagaataagtgaggtgagatgttgtgtaagaattattactgggttagcccaaacactgctcaaactgatgatattgaaagatagggtagatctggaactcgcaggtctgacatacacatgctcagaacatagggaacaactcccatagggaacaacccccaatgaggaacaatcctgtaaagttctaatataaaataagagaccggtgctgtcctatgacggcagcaataacaaggacataaaacaaacaaacaaaaagttggaaggaccccaagtatttttgtaacctgctgaagagctgaatgccagagcaggaaaagtctggcaatcttaacagaaatgtcagaaaaattctcttgcaaagggcttcctctgacagtcttctttcttctctacaaaggctagattacagtgatgggaaaggactatcagtacacagaatcatgtagggatgttggttgcaattagtgcagtgaagggactttccagagtctggggtacgcatgttttttgagagtagggtagatgtaacttttgtctatactggagattgcttaatagacaaaaaaaaaaaaaaactgaaactgctactactggcaggttaatatactgccagtatataattaagtaaagccaaaaacatatctggaactacagaggaaaaataaccctctatgagcacatctgcttcttacctacaagacaaaactaaacagatctgactgttccttaaagactgacagctagatttaaacgtaagtaagagggggaagaaataggcatacaattattttagataagttttttctgtgttaaaatctctagagattgagagaggaaaaaaaatctagtttgctttcaccattatattttcctctctgaaatcacctataactattcttccaatctgcataacaattgataaatcaaaggggtttgttgctactaagactgtcccctagatcccctagatcttttttttttttctctcgccctctcttacagtgctgatagatcttctttagaggagaggagatacggaattttaaagatcaacatatcacactaaatgtataatactggttttaaaaatcacatagtactttacaacagatagtgctaatggtctcctatttatagtaaaaatcatttcttgaaaaacaaagcataaaatataatactaacatattggggctatgttagtaggtcactgttggaaaattcaaaagcaacttgaaactgaaaagccattattaacaattattttcagccaggcacggtggctcgcgcctgtaatctcagcactttgggaggctgagacgggcggatcacaaggtcaggagatcaagatcatcctggccaacatggtgaaaccctgtctctactaaaaatacaaaaattagatgggtgtggtggcgtgcacctgtagtcccagctacctgggaggctgaggcaagagaatcgcttcaacccgggaggcaaaggttgcagtgagctgaggtcaagccactgcactccagcctggcgacagagtgagatcctgtctcaaagaaaaaaaaaaattattttctttctcattagccataagccactaaaattcaatggcaaagaacgatgaaaatatctgagtgccaagtctaaaaaatggtgtttgcggtaaaatagtaataattctcagggtgacaggaaatggtctattttagactctaaagaggggtacaaggaacctcagataacagtcctaggccaggcacagtgactcacgcctgtaatcctagcacttcgggagactgaggcgggcagatcatctgaggtcaggagtctgagaccagcctggtcaatatggtgaaaccccatctttactaaaaatacaagaaattagctggacatggtggcgggtgcctgtaatcccagctatttgggagactgaggcagcagaattgcttgaacccgggaggcagaggctgcagtgagccaagatcatgccactgcactccagcctgggcgcaacagagcgagactccgtctcaaaagaaaaaaaaaaaaaacagttctggttaagacatttggcaaaggacaatctgtttagactgcagcaaatgccttcagtgtgtacacagtttgtttcaaaaacattaatttgagttcaatataaattaaactatttttaaaaatgaatccaacttagcagcgacataacactaaataagccacaaggcagcctccattaagacacccagcaagaagggcagtgttaaaacggcagtgttaataagaacctccgtgtgtaccaaagagaatgcctgaacttaccccaggcaagaatctactccagggagaaaagaggttggtcttctggtgatagttatactcaatttcctctgtggtgcttgacctagtgagtttgacttaggtaaccaaaaattacaaatgactgaaatgtaataatgatgatgatgatgatggtctaaaacttctgtccaaaccacaactgtgtagaggggagatgaaatatagctcactttggaagtataaattaacttactatgtgggaggttaaaaactctatataaagataaccacctcaactataagctacactctgtactttttttcagggtttcaacttcccttatctggattttaatttttttagacaaaaaaaatttaaattgtaaaacacagagtaggatgtaggtagacagaacagttccagcccagtaagaactatttgcaaatgatcagaatccatcacagccatggatataacttatttggacgctgaagttgtgctggattaatattcctgatatggttgagaataaagagatagatttattctacaagtcacacataaaaattagtccaactactagtgtacaaaggatcaagaaaagctaaaaatttccaaggtggcaatactccctaatcaaatatcatgacttcttgaggaagtaaaacccaaaagaaatagtagcaacattttcaaacaaaacctattcctggcaatcctattcaatacaaagtctgggtttacctatagcatatctataaacacttcctacaacgatttgattctcaccttctggagaagtgaagacaatgactgggaactcttcctcctctgatgatgaattcatcaacagcttgcctgtctctgtatttatactcataagatcacctgtctatctacttcagatcattagcataaagccttcaagagtaattttatttatggcaaatgttctccaataagcaagcatactgacaatttagatgacgagctagtgttaactcaaatgctttcccagacatttatatttttaacttgttaaagttaaaattttaggagcaataaaattactttcaattctagggacattgtcatacactggaaacttcataaggcacagaactgtcttttcagcactctgataaactggagagatatttagtaattacaacatatattttgtcattctgctcagaatttaaaacaatgactataatcacagaagataaaagctggaagagccactagatgttatctagtcctttgcagttcagggactggctacactggcttctcctgggagcttgttaaaaatgcaaaatatcagaacccaccagagacctactgagccataatctgcattttaacaagatccccaggtgggctagatcccctcatcttacatacaaggaaactgaacctcaaggagtttaataaatcagttgcccaagatcatacaacaaaaagttataatcaaactcagtcttaactcccagtcctgtgtccagcctcccctccacatccaaacaaacacttaaggaagtctattaaggtccaggcatcacactatgcaaatggttacaaaaatgagtacaccagagcccttgttttgaaggaacctagactagtgatgaagtcagatataaaaacaggtcattatcttttttttctactttttgagacaaggtttcactctgtcacccaggcacaatcttggttcactatagcctcaacatcccgggctcaggtgatcctcccacctcagcctccccagtagctgggactataggcactcaccaccgtacccagctaattttttgttttgttttatagacagggtttcgccatgctggccagactggtctcgaactcctggcttcaagcaatccacccgccttggcctcccaaagttctgggactacaggcatgggccaccgtgcctagtctctaggtaatttttttgtagagatggggttttgccatgttgtccaggctggtctttcaaactcctgggcgcaagagactgccgccttggcctcccaaagtgctgggattacaggcatgagacactacacccagcccaggtcattatcttttaagtgtggtgacaaaactttccctggggcactatgggagtaaccctgtctaggagggggagtagaagcacaccaaataaaaggcaaggggacaatcaatcaaagtagaagggaattcgtgagcgaagcctgacaatgaggaaaaagcatgaggaatacagtggaaaaacaagaagcgtggtgctaatgaactacaacaggaactccaggtcaagatcatggactaagacatgtaaaggcctaaatttcaggtttgcaaaaacaaatccccaaatataaggtcatttccaaattccacaccaagagtaaattttactctgcaaagaatcttttattcaggtgacctttcagtctttctcatctctctttaaagtgtttcatgatcaatatagtagcagattgggaaattttactttgctttttgcttcctactcacctccattggtctctcacaaatttaaagtcagacctgatttagaaataatgacctataaacctgaacaggtgagtgatcacgttaatagtgaattacaaaccaaaacctcccttctgtggaatccatccacccactcccaaaaccataggtggaagtcaaggcctatagcactcatgcatgtggaggaggagcccagagagaaaaggcatggaatcaaaaccacaccacataacattcccagttccttgcagaaggtagaggtaaataagcagagggtgacaagatagtggtggtatgagcccaaggatgcctcaacatattaatgcttaagaccatataccccaagtactattaataatacatgaactaaaaaataacaacatgtcttagggaaccacctacccaaagctcttcagttataggaacaggtacacctaacttcatacaccagctagatcataaagttgggtacaaaataaaatcctgttaaacttattcacccctgatgttttgcctttgtgccaggcagaatatcagctatcgtaactctatgtcctggccctctggaaaggagtttatgatcaacaaataaacccttaaatgaagtagggtggttgcaatttaaagaaattctaaagtagtatcattctagagagaagtgcttttgcaaatgttgttttagtttgatgcatgcctatcaatggttgttcattccaaaagtgacaagcttaacacagaacactttatagaaacgttataaagtttaagcaagtgaataaaacctctgttttagaccttgtgccacagaggtaactatagaaagtttcttgtagtttgggtaccaagggtgtttcacaagtatccttcttccacatggagttttcagggctgttaggaaatgtaagatataggccgggtgccgtgggtcacgcctgtaatcccaacactttgggaggccgaggtgggcagatcacctgaggtcaagagtttgagaccagcctggccaacatggtgaaaccctgtctctactgaaaatacaaaaattagccaagcatgatggcgcatgcctgtaatcccagctacttgggaggctgaggcaggagaatcacttgaacccaggaagcggaggttgcagtgagccaagattgcgccactgcactccagcctgggtgacagagcgagacaccatctcaaaaaaaaaaaaaaaaagatagaataccattgtacaaatctaatcctaacaatcactctcatttttttaaagtgtcataggctttataaactgttcatttaatccttccattctccttaagtggtgggtcgtaacagctgttcgcagtcatcctcttcaactccaaatgagaaacaaaagctcagtcagtgcttgcatactaaagtataaccaaaaagaaaaaaaagaaaagataagtggttaagtgacttgcccaagggcaagctgattgtggtaaagctggaactacagagaaagaggaagcgtgggaaggggagggacagaggtggtgctgaaggaaatcatacactggtttattctccagctcctgtttatcaccctcacagtccttccctagccccattcttcttcccttacaatcccaaataacaaaagccaggaaacaaaaattaaactaggtcaaaataaatgctccaaggaaagttttcagtttttcactccttcttctgcatataaaacacaggtagtagggggagtctgcaatgcttctaatctaccaaaggaatcccttagctaagaaccataatacatggcaggattaaatgtataacaggtttaaagcaagagagtatatgtacagaactgactcatgcatgaaaggaaacataaaaacaagtactacagtagacatgaatgggtttaagtatactattttttaaaagtatacattaaaccatataatcagaaaaaagagaagaaaatcataatcatcttggtagctgcagaaaagtacttaaattcaacaaccattcacgtatttttttaaagtcagcaaactggaattaaatttatccattttaaaaagaatatcatagaaactatggtaattatcatactcaatggtatactcaatagtttacattacaattaatgtaaacaatctcccgccctcccccaccaacacgatgccactaacacttcttctatttcaacattgtattggtagttctaaccagtccaaataaaccaagaaaaagaaacaaaacacatagagatgggaaaggaaagaggaaaaaaattaacatgattctcaagcaatatgattatgtatatagaaaatcccaagaatctactgacaacttccacttctgggtaggatatagcagctcatggcaaactaattcagcttcaacaactagaaaaggccatgataaattacaaaaatcacatttgcaaagatgttggaaagttgtgcaagcaacaaggattggataaactagttccagaaaggtgagcaacctctgaggtgagctgataatcatcattcattttcttatctgggaatatctgctaattctgagtgcagactgaagatcatgcttgccctaagcaaagggactgtactggacgaagaggtattattgaggcttcagtggtggcatgaagttggtgtgacagattaaagtcccaggaggtcccaaatttgcaactaactttcccaacagaagattttctgagatactactatgtatttaccagaatggctaaaaagaaaaagagggcaaataccaagtgttagagaagttaacaaactctcacacactgctacagacatgcaatttggtatgggtacaaccattttcaaaaactggcactatacactaaagctcacactatgacctaacaatgctagtaacagataaataacccaaataaatgcatttatatgttcatagcaacactattcaaactagcccaaaccagaaatgatcaaatgacaatcaacagtgaaatgataaattgtacatgcacacaatggaaagtatacagcaataaaaaggaataatatagaacaaagcacaataaacatgaatctcactaatatagggttgagtgaaagaggctagacacaaaagagtaaatactgtaaccttccatttatacaaagcagaagagcaagtaaaatcaagctatgctttcatcccaggatagtcattacccttgggagtgggagtagtgattggatttggaaaggagaatgaagggggctttggggttccaggtcatgtgctggttatacaggtacgttcagtttgtaaaaatgcattaagttgaacactgccatctttcaattaaaagttcttaaaaatagagcttttcaaaatatcataaaacacagtaaaataaaaggaagggggagatacatgaattactgatattacaaatatcaaccgccaaaaatcatcctggaaatagtaccacttgaatactggaaagcagctacccataccaaagaggtgctaaactaagaaggctcactaaggaacagtagtacaattaacataattaaaccttctcaggtgtgtctcgagacaattatttcaattatttctgttgatgctatcttggccacaagaaataggaggcccatgtaagtacagcatcagtcaactaagttaattcagtatgctaaatcttttaactcaggactttactcattacatattatttgaaaactagcttttagtaattactttagactctagttaagatctaaaaataaaacttgacacttccagtaactaatagctaagtataacatagataaaagcaaaatgattaaactttgaataaattctcccctcaacaattttcaatatttataccaaacaacttctaattcaggatttgaatgagaaaaattatttttaaaacaaaattaaaagaataccatataacgttaacatttcttcaaactcaactaattttacatatgggcaacctcccacagatgcttcatgaacccagaacagcaagggcagcttaaagacacctgtcatggttttcttcttcttcttcttttttgtaagatagggtctcactcccagcgcccaggctggagtgcagtggcactatcatggctcatgacttcctgggctcaggtgatcctcccacctcagcctcctgcgcagctgggactacaggcatacgccaccatgcccggctaattttttgtatttttttttttttttagtagagacagggttttaccatgtttcccaggatgactcgaactcctgggctcaagcaatctgcccgcttcggcctcccaaaatgctgggattacaggcataagccactgcacctggcctggtttctaaagatcaattcaaatcacaggctgggaagagttatcgacctgtaagtaattctctcaagatagccttctaaaaaaagcaaaccataaatatcccttatcaaaaatggttgggatcagatgtatttcagattttcctggatttttaaatatttgcattacatttaccgatagagcatctactttgagcatcatgttggtgctcaaaaaatttagaattttggagcatttctgattttgaattttgaatttttcagatttggaatgctcaacctgtattctgtacagacagttcagttccactcatatgtacagaagatgatctgcccaactcagagaatgctgcctcaggaaacttgacctgtactttgccttaggtgtgattcttcactgtctgcactgatctactgaccacttccagcccgtgtttggtaattacataccctcacctttaccagatgacctctctgctcctgaggcactggatactactggactattctggtcaaaccagactttctggcctcatctagcttgtttttttaaaaaacagttctccctatgttgcgcaggctgaacttgaacacccaggcccaagcgatcctcccatctcagcctcccaagtaggatggtgtgccatcgtgcccatcttggcctcatctagttttgacaatcaagagtcagatgaggccaggcgcgatggctcatgcctgtaatcccagcactttgggaggccaaggcaggccgatcacctgaggtcgggagttcaagaccagcctgaccaacgtcgagaaactccatctctactaaaaacaccaaaattagccaggcgtggtgtcagactcctgtaatcccagctactcgggaggctgagcaggagaatcgcttgaacccaggaggcagaggttgcggtgaaccaagattgtgccactgcactccaacctgggcaacaagagcaaaactccatctcaaaaaaaaaaaaaaaaaaaaaaaaaaaaagagtcagatgaaatgtatacatggctcattaaattgacaggggcacctatagttgcatcacactcagacaacctttcacagagtttctcctgtaaaatatgtttatataaacttcaccaaggcatagttcctggtacacagtagtcatccatgaatggtaacttgattattataaaatcatcatcattattatggtcgcagtggctaaggtgcaaatgaaccacctccataaccaccatgttattaccagcattcttaacacatacttatgtgaattccagatgttatttgtcatctctggaggtcaaaaacattcattaggtaggctgataataggattatactttataagactattaggaaaccaggtaaataattatccctttataattgctatagatgagccagtgtttatagtaagtagttctcaatgggtgactattcccactcaccaaccctcgctgaggacatatggcaatgactagaggcattttttattgtcacaactgaaggtgctaatggcacatagtgagtagaggccagggatgccactaagcaacctacactgtatgggatatctcccacaagaaagaattatatgatccacacctgtaatcccagcactttgggaggctgaggcgggcggatcacatgaggtcaggagttagaaaccagcctggccaacatattgaaacactgtctctactaaaaatacaaaaatcagctgggcatggtggcacaaacctgtaatcccagctactcgggaggctgaggcacaagaatcagttgaatctgggaggcggatgttgtgtgagccaagactgtgccactgcactccagcctgggcaacagagtgagactgtgtcttaaaaaaaaaaaagattttggcacaaaatatcaatagtgctaaggatgaaagaccctagcttatagttctgattttattacccccaaaataatggatgaaaatcaatgcaaccaattctatccacttaaatccaagagacagcctcattaaagtacagaacgcttctataattaaactcccatctatgtatctacatatctctcaatcaatcaatcaatcaatcaacatctaagccacaaaagatttacataaagagaggagaaaaactgataatgaaagagaaagagagaaggaaactttacaggaaccttgtcctagagtaaggaatctagtacgtaagtgaaggggttaagcttagaaagaagcaaagccagtatgtcagaacagatgcttactgaatactcagtcagtatcttgtggcacatatacttgtttagggaataaatctattatatattatacatatatataatatattcaataaaccccttatatagatcctattagtcccattctttactggatggggaaattaaagctcagaaaagttatttggttggaaccacataggtataaaatagaagagctaggattcaaacccaagtctttagacacaaaatgaccatgctgtttaacactccaccaagttaaaagttcatctcaacactttgggaggccgaggcaggcagatcacctgaggtcaggagttcaagaccagcctgaacaacatggagaaaccccgtctccactaaaaatacaaaattagctgggcatggtggcgcatacctgcaatcccagctactcgggaggctgaggcaggagaatctcttgaacctgagaagtggaggtcgcagcaagctgagatcacgccattgcacgtcagcctgggccatctcaaaaactaagtaaataagtaaataaataaataaactgacctatattaaaataaaaaatttctgtgcaaaggacacagtgaaaaggcaacctgtggagtgggaaaaaatatctgataaggggttaatatccagaatatattaaaatctgcaacaaaacaacaaaaaatttctaaatgggcaaaggtcttaaaaagccacttctccaaagaagatatacaaatggccaataagcatataaaaagatgctcaacatcactaatcattagaaaagtacaaatcaaaactaaaatgaagtaccacttcataccaattaggataattattttaaaaacactgtgaatacaaaaaattagccgggtgtggtggcaggtgcctgtagtcccagccaatcgggaggctgagacaggagaatggtgtgaacccaggaggcggagcttgcagtgagcagagatagcgccactacactccagcctgggcaacagagctagactccgtctcaaaaaaaaaaaaaaaaaaaaaaaatcgtggccaacatggtgaaaccccgtttctactaaaaatataaaaattagctgggcgtggtggcatgcgcctgtagtcccagctactcaggaggctgaggcaggagaatggcatgaacctggaaggcagagcttgcagtgagccgagatcgtgccattgcactccagcctggcaacagagcgagactcggtctcaaaaaataatattaaaaaataaaatagaataaataataagtgcaggtgaggatgtagaaaaactggaacctgtgcacacttgctagtgggaatacaaaatggtacagcagtatggaaaactgtatggcagttcctcagaaaattagaaatagaattaccatgtgatctaacaattccacttctggatacatatacaaaagaaatgaaaccaaagactcaaacagatatttgtacagctatgttcatagcagcagtactggcaacagccaaaaggtggaagtcacgccagtgtccactgatggatgaatcagtaaacaaaacgtagtttatacaataaaatttattcagccttaaaaaggaaaaaaattctggcacatgctaccatatgaacctagaagacatactaaatgaaataagctggctgggtgcagtggctcatgcctgcaatcccagcactttgggaggctaaggcaggtggatcaggaggtcaagagatcgagaccatcctggccaacacggtgaaaccccatctctactaaaaatacaaaaattagctgggagtggtggtgcacacctatagtcccagatactcaggaggctgaggcaggagaattgcttgaacccgggaggcagaggttgcagttaggcaagactgcaccactgcactccagcctggtgacagagcaagactccatctcaaaaaaaaaaaaaaaaaaagaaaagaaatcagctaatcacaaaaggacaaatactacacaactccacttatataaggtacctagagtagtcaaattcacagacagaaaacagacaggtggttgcaagggtctgaagggaggggaaatggtgagttattatttgatgggtacagagtttcagtttggtgagatgaaaaaagttctagagatggatgatggtgatggttacacaacaacgtggatgtatttactgccaccgaacaatacacttaaaaatgctcaaaatgggccaggtgcagtggctcatgcttgttaccccagtactttggaaagccaaggtaggaagatcacttgaggccaggagtttgagaccagtctgggcaacatagtcagaccccatctatacacacacacaaaaaggtcaaaatgataaattttatgttacatattctttatcacaataataaaaccaaccatgatgggggggtggggtgagaaacaatcaatattctaacaaactaacctaacaactataaatgagtaacataatcacattgaaggagtgtaaaagaaaagaacttaactatggaaagctggattttgactggatacaataaagcctaagagaaaaagaactacatgcaaatattgtgacctattttaaaaatgtttctcacaggtgagctagcaattatgaaactatgtgtacactagaattgaggaaataagaaagtaaattgtagaaaatgaaatccagtgttctcattgttggaaaaagatgttataaataagaaatgggagaaggctacaattgtggtactaagttggaatcaaaggtatcaatacaaacttatatttttattatatacaaaaagacatagaaatataaaaacgtgtatatgtggctgtccaccagaggcactagactggccggccactagaagcaatgacacctcagcaacaatgagcacatctagtgcccagatcttggtctgcgaagattattttctgctcaggtgagttggctcacgcctgtaatcccaggactttgggaggctgaggcgagcagatcacctcaggtcaggagtttgagaccagtgtggctaacatggtgaactcccatctctactaaaaatacaaaaattagccaggcatggtggcacatgcctgtaatcccagctacctggaggctgaggcaggagaattgcttgaacctgggaggcagagattgcaatgagccgagatcacaccattgtactccagcctgggtgacagagtaagactcagtctcaaaaaaaaaaaaaaaaaaaaattattttccaataaaaggaactaagtgattgattcaagggctagggcaagaaaaatatgagtctagaacagaagtaaaacaatactctaaaaaagatggggcttattcaaaatacacaggagccaaaatgaagaaactcctaagggtccaagccataataatttgagcaacaaaacaaagaacgatagtactgaattttcagccgtaagttaagataaatgtatgttcatagcaatataaataaataagaaaaagaaaaagcaggctgggcatggtggctcacacctgtaatcccagcactttgggaggctgaggaaggcggatcacctgaagtcaggagttctagaccaggttggccaacatggtgaaatcctgtctctattaaaaatacaaaaattagccaggtgtggtggcacacgcctgtagtcccaggtactcaggaagctgaggcaggagaattgcttgaacttgggaggcagaggttgcagtgagccaagactatgccactgcactccagcctgggcaacagagtgagactctgtctcaaaaaaaaaaaaaaagaataccaatctttctcaaattcttccaaaaaagaagagagaatacctccaaactcattttatgaaatcagtattaccctgatactaaagccagacaaggacattacaagaaaagaaaactacaggccaataaccttgatgaatatagacaaacatttagccagactaagaaaaaaagagagacaacacaaaatcagagatgaaaaaggagacattacaactgataccgcaaaaattcaaaagatcattagtggctattatgagcaactatatgccaataaattgaaaaatctagaaaaaatggataaattcctagacacatacaacctaccaagattgaaccatgaagaaatccaaaacctgaacacaccaacaagtaacaagattgaagccataataaaaagtctcctagcaaagaaaagcccaggacccatggctttcctgctgaattctactaaatatttaaagaactaataccaattctactcaaattattccaaaaaatagacaaggaaggaataactccaaactcattctatgaggccagtattaccctgataccaaaactacacaaagacacatcaaaaaaggaaaactacaggccaatatcactgatgaatattgatgcaaataccctcaacaaaatactagcaaaccaaattcaacagcacgttaaaaggatcattcaccttgatcaagtgagatttatcccggcaatgcaaggatggttcaacatcaacacacttattgcaaatcaataaatgtgatataccacattaacagaatgaagggggaacaaccccacacaatcatctcaatagatgcagaaaaaaggctaagtatagtggctcatgcctgtcatcccagcattttgggaggctggggtgggaggatggcttgaattcaagagctcaagactagcctgggcaacacagcaagataccgtctctacaaaaacagctgggcatgatggcacatgcctatattcccaagtactcagggatgctaaggtagaaaggtcccttgagcccaagagtttaggtctgcagtgagccatgattgcaccactgcactccaatcaggctgacaagaatgcaacagtgtcttaaaaaaaaaaaaaaaaagatggccaggtgcagtggctcatgcctgtaatcccaacactttgagaggccaaggcaggcggatcacttgaagtcaggagttcgagaccagtctgaccaacatgggaaaaccccgtctctactaaaaatacaaaattagccaagcgtggtggcacatgcctgtaatcccagctactcgggaggctgaggcagaagaattgcttgaacctgggaggcagaggttgcagtgagccaagatctcaccactgtactcttgcactctagcctgagcaacaagagcaaaattccatctcaaaaaaaaaacaaacagaaaaatacctcttcacagatagctttcagatgccacatgcaggagctgtgaaaaaaggggggaaaaatagagcagaaaaataatttgacaaaattcaacagcctttcacggtaaaaactctcaacaaattaggtatacaaggaatacctccattgtgtacttcagtacaataagagccatggaagacaagcaaacaatgaacgtattcagcagtgaaaagctgaaagcctttcctctataatcaggaacaagcatgacaaggatgcccactctcatttctattcatcaatgataattttctgattctgatggtattgtgatgatatagaaaatcacactaaagaggccgggcacagtggctcacgcctgtaatcccaacactttgggagctgagatggggggatcaccagaggccaggagttcaagaccagcctgaccaacatggtgaaatcccatctctactaaaaatacagaattagccaggcatggtggcacatacctgtaatcccagctacttgggaaactgaggcagcagaatcacttgaacccaggaggcggaggttgcggtgagccgtgatagtgccattgcactccagcctgggcaacaagaaaaaaactttgtctcaaaaaaaaaaaaaaaaagaaaatcacactaaagtatccaatggtcaaattactgtaattggttcaggaaaaaaattatttgcactatattgtacaataaaaacttttcagtatgagattgtttcaaaaatacagtatatctctttcatgacaaaaatgctgatcaaactaggaataaaagagaatttcctcaacctgaaaaagggactctatgaataagctactgctagcatcgtacttaatggtgacagataatgtttttaccattaagatcaagaagatgacaaggatttccactcttgccacttctattcaacactgtcctggaagttctaaacagaccaattaggcaagaaaatgaaataaacggcgtacaaattagaaagaaaaaagtaggccgggcgcggtggctcacgcctgtaatcccagcactttgggaggccgaggcgggtggatcacgaggtcaggagatcgagaccatcctggctaacaaggtgaaaccccgtctctactaaaaatacaaaaaattagcggggcgcggtggcgggcgcctgtagtcccagctactcgggaggctgaggcaggagaatggcgtgaacccgggaagcagagcttgcagtgagccgagattgcaccactgcagtccgcagtccggcctgggtgacagagcgagactccgtctcaaaaaaaaaaaaaaaaaaaaagaaagaaaaaagtaaaattagctccatttgcagaagacatgatcttgaatataaaaatatcaattgtatttccatacagtagcaatgaacaaactaaaaataagaaaacaattaataatagcatcaaaaaataaaatactgggtgggcacagtggctcatgcctgtaatcctagcactttgagaggctgaggcgggtggatgacctgaggtcaggagttcgagaccagcctaaccaacatggtgaaaccctgtctctacaaaaaatacgaaaatcaggctgggtgcagtggctcacccctataatcccagcactttgggaggccaaggcaggtgatcacctgaggtcaggagttcgagaccagcctggccaacatggtgaaaccctgtctctactaaaactacaaaaattagccgggcgtggtggtgggtacctgtaatcccagctactcgggaggctgaggcaggagaatcgcttggacccaggaggcggaggttgcagtgagctgagatcgcgccactgcactccagcctgggcaacagagcgaaagtctgtctcaaaaacaaaaacaaaaattagctgaacacggtggtgggcgcctgtaatcccagctactagggaggctgagacaggagaattgcttgaacctgggaggtggaggttgcagtgagccaagatcttgccattgcactccacctgggctacagagtgagactccgcctcaaaaaaaaaaaaaaaaaacttatgcataaatttaacaaaagaaatgtaaaacttaaactttaaatggaaagactcccatgttcatggatgggaagacagtatttttaagataacagtaatccccaaatagattaaaatcccacctaagcctccttttttgcagaaattgacaaattgatcctaaaacttgtttggaaatgcagaggacccagaatggtcaaaaaagtcttgagaaagaagaacaaagctggaagactcaaactgcctgacttcaaaacaattgtaagcaaaatagtgtggtactggcatcaggataaacatacagattaatgggccaggcacggcggctcacacctgtaatcccagcactttgggaggccgaggggggtggatcacgaggtcaggagatcgagaacaacctggataacatggtgcaaccccatctctactaaaaatacaaaaaattagccaggcttggtggcgggcgcctgtagtcccagctactcaggaggctgaggcaggagaatggtgtgaacctgagaggcggagcttgcagtaagccaagatagtgccactgcagtccagcctgggagaaagactccatctcaaaaaaaaccatacagattaatggaacagaacagaaagctcagagttaaaccctcaccttttgatcaatttatttttgaaaaggatgatggccgggcatgttgtaatcccagcactttgggaggccaaggtaggcagatcacttgatgccaggagttcgagactagcctggcgaagatggtgaaacaccatttctactaaaaatacaaaaattatctgggcatggtggccaacacctgtagtcccagctactcaggaggctgaggcataagaattgtttaaacctgggaggcggaggttgcagtcactgcactacaacctgggcaacagagcaagattccacctcaaaaaaaaaaaaaaaaaaaggatgcaaaacaattcaatgaggaaggactagtcttttcaacaaatggtactggatatccacatgtaaaaagatgaagttggactctcacctcacaccatacataaaaactaattcaaaatagatcaaagacttccatgtaacagctaaataattaaacaatacaaccttttttttgagatagtgttttgctcttgttgcccaggctggagtgcaaaggcgtgatctcagctcaccgcaacgtccacctcccgggttcaagcgattctcctgtctcagtctcctgagtagctgggattacaggtgcctgtcactacgccaggctaatttttggtatttttagtacagacagggtttcaccatgttagccaggctggtctcaaactcctgacctcaggtgatccgcccacctcggcctcccaaagtgctaggattacaggtgtgagccaccatgcctggccaataatacaaatcttaaaagaaaacttaaatctttgtgaccttggattgggcagtggcttcttagatatgacatcaaaagcacaaccagttttttaaaaagacaaattagacttcaacaaaatttaacactttctgcttcaaagaacaccatcaagaaagtgaaaagacaacctatagaatggcataaaatatttgtaaatcatatatctgataagggacttgtatagagaatatattttttcatttgtatttttttgaagatggagtttcactctcgtcacccaggctggagtgcagtggcacgatcttgcctcactgcaacctctgcctcaagggttcaagcgattctcctgcctcagtctcccgagtagctggggttacaggcgtgtaccaccatgcccggctaatttttgtattattagtagagatggggtttcaccttgttggtcaggctggtcctgaactcctgactgcaggtgatccacctgcctcatcctcccaaagtgctgggattacaggcatgagccaacacgcccggcctagagaatatattttaaaactcttacaactttaataaaaaaaaaaaaaaacccaattaacaaatagaaaaaggatctgagtagacatttctctaaagaagatatataaatggccaagaagcatatgaaaatatactcactggtcatcaggaaaatgaaagtcaaaattccaatgagacaccacttcatacccaccaggatggcttataacaaaagtacatatagcaagtgttgtcaaggatatagagaaattggaattttcacacactgctggtggaaatgcaaaatagtgccgctgctttgaaaaacaacctggtagttcctgaaaaggttaaacacaagagttagcatatgacctagcaattccgctcctatgcatatccccaagagaaacgaaaataagtgttcacatgaaaacttgtacacgaatgcccaaagcagtattattcattatatctcaagactggaaataatccaaatgtccatcaactaatgaatggataaatacaatctggtctatccatacaatgcaatactatgagtactaaaaaggaatgaagtactgacacatacctcaatatgaatgaactttgaaaacattatgttaagtgaaagccagacacaaaagaccacatattgtttgatgtcatttgtatgaatggtccagaacaggcaaatccatagaaagaaagatgagtggctgccatgggctcagggaagagtggaatagagtgtaactgccaaagggtataatgtttctttttgaggtgacgaaaatgttttaaaatgattgtggtgatggttgcacaactctgcaaatacactaaaacccatgaatggtatattttttttttttttttttttgagacagggtatcactgtcacccaggctggagtgcaatggtgtaatcatggctcattgcagctttgacttccccggctcaagcaatcctcccgcctcagcctctggaatagttgagattactggcacgtgcctccacactcggctaattttttattttttgtagagatagggtcccactatgttgcacaggctagtttccaactcttggactcaagcaatcctcctgcctcagtctgggagtcacaggatttacttatttaaaaactcaattgtttaagggaaagagttaaactctagtgtgcttcattgatttcctctgccccttttgctgttttatgacaattcctaatttgttcattaatatttctagaaagatgctatgttgttgccatataataatatcgataatagtttggctggttgactgtaagtacaaataacatattcattttccttaaaagtctgttagtttaaccgtgtatctgactggccagatagtcttgtctatttggcttctgggaacggtgtcttcccagtgtcaacgttcctatctgccttatttatgtgacctgactgaccagaaatcctaatgtagccatcttgctccaaaaggttcttggtcttccctaccttgttacattacactcatcgtcttcttgacttactgtacactgtttgctctcttttctccctctcttcttggtgagcaactcaagagatgcctcaaaggttgagagaagtgagctgggcatggtggctcacacctgtaatcccagcacttcgggaggccctagcacgtggatcacctgaggacaggagttcaagacgagcctgttcaacaaggggaaacctcgtctctactaaaaatacaaaaattagccaggcatggtggtgcgcacctgtagtctcagctactcaggaggctgaggcagaagaatcacttgaacccaggaggcggaggttgcagtgagccaagatggagccactgcactccagcctaggcgacagagcgagactccgtctcaaaaaaaaaaaaagattgagagaagtgacttgttactccttttatgcatgctcacagagctcaggctgatagctccacttactttcctagaagcaaagctaacatgctcttccacacccaccaccttcactccatcctcacctgggttctagacaataaggcgaactcaggccgggtgtggtggctcaggctgggcgtggtggctcacacctgtaatcccagaactttgggaggccaaggtggatggatcacctgaggtcaggagttcgagaccagcttggccaacatggtgaaaccctgtctttctactaaaaaaatacaaacattagcgggcacggtggtgggcgcctgtaatcccagctattcaggaggctgaggcaggagaatcacttcaacctgggaggcggaggttgcagtaagccgagatggcaccactgcactccagcctgggcaacaagagtgaaactccgtctaaaaaaaaaataaataagtaaataaataaataagtaaggcgaactcagcagtagcacagctgtctaaagtagacttcctaagagctgtgggacttttcatttctctgtcaacctcctatagttgccataaggatcaaataagatgatgtgataatcttcgtaaactttaaatgaggcaaagggtagtcctgcaaggatcaaataagatgatgtaagctgggcgtggcagctcacgcctgtaatcccagccctttgggaggccgaggcgggcggatcacctgaggtcaggagttcaagaccatcctggctaacatggtgaaaccccatctctaataaaaatacaaaaaaaaaaaaaaattagctgggcgtggtggtgggtgcctgtagtcccagctacttgggaggctgaggcaggagaatggcttgaacacgggaggcggagcttgcagtgagcggagatcgcgccactgcactccagcctgggtgacagagcgagactccgtcaccaaaaaaaaataaaataaaataagatgatgtgataatcttcgtaaactttaaatgaggcaaagggtagtcctgattacacaatcatttctgtactttcggagcaatttacatgtgtattttgtttcatttttattattaacaaaaacctccagtatgtctgaaaactactaagactaacttcctccaatcactgtatagaacggatcacaaatataatgtttacaaggccaaaaaagtaatgtaaataagcaaagcaggctgtaagaaggaatgcatgccccttctgaaagacaaatcttccctagctcaagctaattgctgccaggcaggaatgtgggcccactgttaccagattatccctttttcccaaaaggaactgaactctcaggatttctaagtgttgattcccatttaaaaaataacaactgcaaaacatatccacatgccacatcccagcctactggtctacagtgacctcatttatagtcggtcatactctctaaaataaaagcaacatcaagtgaggagttagtgatatgtaagcacaagaaaggaaaaagaactatgcacctgtagaaggcaacgttcagaaaccaaaacttggtaggattaataaagatatttgaagctacttagtctggtggctaggaaaaagactcatgcaaactaaccaattcaagataaaaagaataaccaagtgtcaagtcagagtgacttttccactacatcacactggctcccaaatggatagactatagagagaataaggcatttttttcaactggatggcagtttaaagtagtctggagtacaaacttagaacaggtgtcaatcttactgatatcttcctggaacagaagctgaattcaagaatattttaccctggaccaaatgttatccaacactcccagcctatattggccatcagcagagcatacagaaaccacagagtagcccaacaatgggaagggagaaactttcaccaactcaagaaagaaaaaaaagaaggaaaatcaggtgactaatgtttgttttcattatttcttgttttaaaagcaaaatttcaaatttacttcctccataaaaagaaaagcaggctgggtgtggtggctcacgtctgtaatcccagcactttgggaggccaaggcgggtggatcatctgaagtcaggagttcaagaccagcctggtcaacatggtgaaaccctggctgggcacagtggctcacgcctgtaatcccagcactttgggaggccgaggtggacagatcaactgaagtcaggcgttcgagaccagcctggccaacatggtgaaaccacgtctctactaaaagtacaaaaattagccgggcgtggtggcaggcgcctgtaatcccagctacttgggaggctgagacaggagaattgcttgaacccgggacgcggaggttgcagtgagccaagaccacatcattgcactccagcctgggcaacaagagcaaaactccacctcgggggggaaaaaaccatggtgaaacccccatctctactaaaaatacaaaaattagctgggtgtgtgggtgcatgcctgtagttccagctccttaggaggctgaagcaggagaatcacttgaatctgggatgcggagtttgcagtgagccaagattgcaccattgcactccagcctgggctacagagtgagactctgtctcaaaaagaaaaaaaaaaaaaggctgggcatggtggctcaaacctgtaattccagcactttgggaggctgaggcgggcagataacaaggtcaagagattgagaccatcctggccaacatggtgaaaccccatctctactaaaaatataaaaattagctgggtgtggtggcacgcgcctgtagtcccaactacttgggaggctgaggcagagaatcgcttcaacctggggcagggggcagaggttgcagtgagccgggatcacgccactgcactctagctgggcagctgagcaagactccgtctcaaaaaaaaaagaaagaaaaaaagaaaagaaaagcaaatctttaagttcaattaaaaaaatcttaaagttcaattttaaagggaggggaaaaaagaagccatatgtcttttttgtcaaagtctcacaaaggatatccctgaaagcttgctgctttaaccatatgctagataacctgtaaaataacttaattcccaagtacttacaatactagaattctagagctagatggagggagtggaagccattcaggtcatctctctcacttttgtagtcttattctacaaaggtgtagattcacactaggacccagatctatacttttctgtttggaaatcaccagaagatctacaaaaagttatctcccatgtagtctttacatgaaagcttgttccaatatacaactactcttgaatgaaggagcaagccaagaaagaaaaaaatttgagaaccaggaaacagatccattagaggagagaagcaaagggaaattccaggcaaccattctgtagcaagcctggagaaaactagttcaaactacagcaagaaggaaaaagtgtcctgaaggatagtctccaaggagaaaatatggaaccaatagatcatctaatagatttgatcatataagaaactgtactaggccgggcaaggtaacttacacctgtaatcccagcactttaggaggcagaggccggcagatcacttgaggtcaggagttggagaccagcctggccaacatgacgaaaccctgtctctctactaaaaaaacacaaaaattagtgggcatggtggcacacgcctgtagtcccagctactcaggaggctgaggcaggagaatgcttgaacacgagagacaggggttgcagtaagccgagactgcgccactgcattccagcctgggcgataaagcgagactgtctcaaaaaaaaaaaaaaaaaaaaaaaaaaaaaaaaaaaaaaactgaaactgtactaaatgtccataggaccataagatcaagtgggaagaatcagaaatatgtaaacagttgggtgtgatggctcatacctgtaatccttgctacttgggaggctaagcagaacgatcacttgaggccaggagttcaagaccaacctctgcaacacagtaagaccccatctctaaaaaaataaaatagctgggcataacaaagcaacagaaaatttctaaaattaagagatcaagaaataacagtagccaggtgtgctggctcatgcctgtaatcccagcactttgggaggctgaggtgggttgatcacctgaggtcaggagtttgagaccagcctggccaacatggtgaaaccccatctctactaaaaatataaaaaaattagccggcgtggtagcgggcgcctgtaattccagctactcaggaggatgaaacagaattgcttgaacccaggaggcggaggctgcagtgggtcaagatctcgccactgcactccagcctgggtgacagagcgagactctgtctcagaaaaaaaaaaaaaaaaagaaaaaattagctgggcatggtggtgggcacctgtaattgcagctactcaggaggctaaggaatgagaattgcttgaactcaggagacagaggttgcagtgagcaccactgcactccagcctgggcaacacagcgagactccatctcaaaaaaaaaaaaaaaagaaaagaaagaaagaaatggtatttgttcttttctcaagaccctattctccccaaaatctctttggctagaacttcagactatttcacttccgatatcatcttccacctctctaactcccaacctctccaactatgtttccttcttatacctaaatgtgagcattgtcaaggctgccccctcccccaccgcatctaaacatagattatttttcctatatccatccatgtccgtgtcttcaactctatcttcagatttaggaaatcagctcaggccttcttaccaagttccagtcatatttcaaatgcttcctgcagatctccccttggctatccagtaatcacttcagactcaatatcatcaactaccatgtatattctttctaaaaaatctccctgttttaacgtccccatctctactaaagatatcgtgctacctctaggaagaagacaatataatggccaacccctgaggttcttgagtgagcccagttgaattcatatctcgctaagccacttactagctgtgtatccttgagcaagttaacctctttgagcttcaatatccttatctgaaagaaaaaaaaaaaagactaccaccaccactctcccacataattaccgtggccattaaacaagacaacatatgtagccaggtgcagtggctcacgcctataatcccagtactttgggaggccaaggtaggtggactgcttgaaccgaggagtttaagaccagtctgggcaacatgacgaaatcctgtctctacaaaaaaaaaaaaaaactccaaaaaattagccaggtatggtggtatgtgccaagttccagctactagccccagctacccaggaaacaggggagtactgagatggcaggagaatcacctgagcccagagaggtcaaggctgcagtgagccctgatcacgccactgcactccacctaggagtgacagagtcagactctatctctctctctctctctctctctctcacacacacacacacacacacacacaacataggcaaagctcctaataaaatgcataaactggaggttatgatgataagtgaaatacgccaggcacagaatgacagacatcacatgttcttacttatttgtgggatctaaaaatcaaaacaattgaattcatggagatagagagtagaaggatggttactagaggctgggaagggtagtgggtggttgagggcaggtggggatggttaatgggtaccaaagaaaaaaaaaaagacctaggatttgatagcacaacagggtgactataatcaataataattgcacatttcaaaataactaaaagagtttaattggattgtttgtaacaaagaataaatgcttgaggggatgactaccccccacccaaaaaagcataacatacaataagcattcaataaatattagctactaaatcttttatggttaacatcgtcagcagcagcaagagcgttacagctgaatccacttagaccccagcacaggtcagacttgttctaggctctggatccatttcctatccttaagcaaaacaaataagaaaccccagtagtaggtcagtattcatcaatgtggttctgatctttcaattgaactagtccctgagctaccaatctacaaactagatttcattcccttgggtatttaaggaccgctcagtcctgtccactaccctacgggacctgagggtaacagccagcccaaaagtgcctacaagactgtgcccactgctgtacccaagcagtggttcgttctcttggtatgcctttggaaaacctgccacctgccaggcaggacaaacatctcacctagctgaacttcttcccagagctgggtctccccgacaagagttttccctaccctggtggcccctcctattctagactcaaagtcactcacgctcaagacctcaggcttctctgactcccacatcgtccctacatcaatcaataactaaactctgctgaatccttcttgcacatgtcttctgcagacactcttctttccttgtcatttgtactaccttctttatccctcatcagtctctgcctgcgtttcaaacagtgcttacaaaaaacagccagattaattagccaaaaatacagctttcatatgtcactgaattgctcaaaaagcatctgaggttctctatatccaataagacaaaatttcactttcctttgctgatattgtgaatttccctacttttgaacctttgctaataccattccttctatctaaaatattttctcttctggttgtggtggcttatgcctgtaatcacagcactttgggaggcagaggcaggaagattgcttgaagccaggagttagagatcagtatggacaacatagcaagatcctgcctctacaaaattttaaaaattagccaggcatggtggcacaagtctgtagtcctagctacaggaggctgaggtgagaggatcacttgagcccaggagttcatggctgcagtgagttttgatcgtgccactgcactccagcctgggtgacagtgagatcctgtctccaaaaaataaaatattttctcaactctccttctttgttcatccaattcaatatttccttcaaagactcttgttcaaatcctatgttctctgcaaagctctcgccattcttactagcagcagggtgttctcagcagagggaaaacaatgcaaatgatctgaggtaagagcaagtcaagcaagtagaccagtgtgactcacattgttgagtaggaagtttattactcaaacctgaaatttgagggagaggttctggctagagaaatacatttgggagttgtcagaatatagattaggcctatcttacagaatttttgcaatgatcaatatgataccagggcatacttgcatgactgccattcagcagtgaactcatacatctttatgaatgatgttaaatgaaagttaaatgaaaaaaagtaactcagaaaagtttgcaataaaggtcaaaagctataaaactaaaataaacaataaaactaaacaatatactgcttaagaagtattcaaatgtgataaaactataaagaaaactaaggaaattgttatccaaatatagaataatacagccgggcacggtggcccacgcctgtaatcccagcactttgggaggctgaggtgggtggatcacctgaggtcaggggtttaagaccagcctgggcaacatggtgaaaccccatgtctactaaaaatacaaaaattagccgggcgtggtggcacgcgcctgtagtcccagctacttgggaggctgaggcaggagaatcgcctgaagctgggagatggaggttgcagtgagccgagattgcgccactgtactctagcctgggcaacaagggcagactctttctcaaaaaaaaaaataataataataataataacaatacctttacaggggaggagcagagttataattggacaggtgagcacagacaggttcaaagttgctggaaatgtttgtttcctaaagtagatggtacacaggtgtttttttcttctttgtcctatatactctggcatgtacaatattaaataagagagtaaaaaaataagaggcaatatataaacatcaaatagatgtttcacaatgtttttaaaaattattaagttgagaaaaaggaagagtaattgtgtgacctgtataacaaggcctaaaaagaataaaggatttagtcatataaagaaaagacagaaagggcatctcggaattgggaatgaataggtcatgtaaaaggagacagcaaattggtaagtctgactggagaagagttaggctgaaaagttgggctaagccagccaacagaatgcttacatgctgggtcaagaagtttgaacttgatcttgaaatagcacagaaccactggtgatatttaggcgagacaacagcttgggaaaagtggtttattaatctgatgtgatgataagaatcaactagtagggagacagaaggctggaaaagtcagttctaaaacctgttcaggtgagataatctcactgatgtaagatgttacgaagatgatcatggcctgaactaggatggtgatgagggtcaagatcactccaagaaactttaggaatctttaggatgaaagactcaggaggattgggtcttgggaataggcaatgagggaaaaagattcaaagattttcaagctaaactgaaaactctcattttcaagctaaactgaaaaaatgataacaacatagcaaaactaaggactctacagaaaaaaattgttttgaaaaaagaccattaatcaattaagttatgcagtaaatatgtactgagtacctactatgtgtcaggcagagtgtgatgccttcccttcagaaagcagattgtgagtcctactttaaaaagttattccgagcgcagtggctcacgcctgtaatccgagcactttgggaggccaaggtgggcagatcacctgaagtcaggagttcaagaccagcctggccatcatggtgaaatcccagctctactaaaaatacaaaaattagttgtgtgtggtggcacacacctgtaatcccagctactctggaggctgaggcagaagaatcacttgaacccgggaggtggaagttgcagtgagccaagatcgtgtcactctccagcctgggcaacagaacaagactcagtctcaaaaaaaaaaaaagttacacttttaataggcaaaaagaaactaaacagttctttgagaagaataaaataattttgtgagtcccactttttaaaaaagtaatcagtatggtgataaaatactaagttgtttttcaaaattaattgaaagaaacaacaaaacataaaagtggaggtgtctagtaaaaggtcagaggtaaagcagtttactgtttattactgaaagctccttgaggacaagatttatggttatctttgcatttacatagtactggacacagtgtgtgatcactacagagtagacattcaaataatgtctaaactaacagaacagtgaaaacagactgaagacaagccaaatgagaaggctccagaacctaacatatctatagaggatctacccctgtggagggaaagtgctctagccttgtcatcctggctaaaaggtagcctgatcctctggctacatgtttaggagatataaaataccaacagaaaaacagaaaggaaaccagtgtttatgaaacatatactgggcctggcacagtggctcatgcctgtaaccccagcactttgggaggcagggggattgcttcagcccaggagtttgagaccaccctgggcaacatgacaaaaccccatctctaccaaaaatacaaaaattagttgtggggtggtggcatgagcctgcagtcccagctactcaggaggctgaggtgggaggatcacttgaacccaagagatgaaggctgcagtgagctgagatcacatcactgcactccagcctgggcgacagagtgaaaccctgtctcgaactttaaaaaaaagaaaacatactgaactttttctcccctaccctggggagactgtccccaaccctaacttctttttttttaagacacagtctcgctcagtcacccaggctggagtgcagtggcacgatctcagctcactgcacctccgcctcctgggttcaagcgattctcctgcctcagcctcccgggttcaagcgattctcctgcctcagcctcatgagtagctgggattacaagcgcccaccaccacgcccggctaatttttttgtatttttagtagagatggggtttcaccatgttgcccaggctggtcttgaactcctgacctcaagtgatccccccgacctcgccctgtcaaagtgttgggattacaggcatgagccaccccacctggcctcaaccctaactttcaagacaggcagaatgtgtggattaggttaaagaaacttcaggggtaccctgttcttttacactattaaaaggcatttttctgattgacagtagtttaaaagcttgaatgttgatagtcccaactgacataccactgtttcctaagcctatggaacagggaaatgcaaagtagggctgcctgcaaagtgagatgactgatgcccaggtggctcaagttgttgccagggaatgggctattatctccaggtgccccagtagttcagataattccacacagtcccaagttataaaatacagctgaacacagaacaaggaggttactctgtaaatggattgatcttacataaatgctttaagaccatctctgtctcaagaggttagaccagaaaatgaatgcccaaataccagcagaggcagtacttgtgtttgcaaatacataacagttaagagctcaggctccgatgccagatagacatgggttaaatcccagctcttccagcaaatagctgtgtggctatctctgttaagacattcttccgactatgtacagtagggctgattgcattccttaagatgagaatatgtggtagcttcagatgttagtgctttccttcctaaaactatgccctaatccctttggttggacctgtattttcctcaaaagcctcactcactgattttagggtagagctttctagctggctcatctcattcattatgctttgaatctctcaaatttccatctttgagaaaaacatatcttaaaactctggatggtcgaccggactttataactacagagaaaatgtaattttaactagaacatacaaaccacttagttatacaaaacttaaaattggtgctttctttaaaaatcacaaatgctatatgctggagacagtatggagacagctaagcctagcctatcagtaatgaatttagaacaaaagcagactgacacaaaagaggacaaaaggaggcatcctgcctgtgcttaccacctgattctctaagttcaggggtcttttgcacattataggagattttgtgatgtagtggaaaacagaggagaacaagttccatagagtcttcatttgtattagcttatcttagtgccccactgctaccatcctaatacaggcagtaaagactaagtcccaacaggtttctctgccttaggactctctccacttcctgacatcctgcacacagccaccaaactactttcctaaacccccagttccatcagataactttccagctcaaaaactttaatggctccctacctactacgcattgggaaaatcccaactaaaattcaagacccaggccagcattaccctactgttataatacaggacttgtgtccttctaattaccccaaggaaattctataaagcttcaaccagactaatcggctcactgctcccccaacacaaactgcccgcatatctaggctggattacgcccacgccagccctcactccaacctttctgccattccttccaaagccagcctacccccccatctctggccccacacactacccatactacccatcttctgaccctcatcaacacacccttgtagctatctcaattcccgtggcatcccaatccgctccaatcaagtcaaagttccttggaaggcagacacatactttacatagagggtccagcacagtgccctgcacttagtaggtgctggctattactgattaaaaccagcaggggttcaaataacgtttctagggagggcaagataatactgcctatcttcttccattcgtagtaaaaagtattcagcgttcactacaagcctgaaaacgcctagcgtacgcagatcaacggtgcagtggagagggcacgccgccggatggcaaaaaacctgtgtcctaatcctggttttgccacaatctcggcagttgctgggaaatcaagccatctctcggagctccggttgtctccgacgtaaaacaagggagctgctgtagaggatcccgaggtatcttttggctcctaaatgtcccccgataggaaaccccacactcgtcttccaaggcgggaggcaggcaaacttttttcccagcgcgggcattccacacggtcctggaaactcagtgcccggagaaaagggcagggctgagggcaaggtgagaagcggtccccccgaagtcgccggattcctttaccccacggctcgagtccgcctcaggttcccggccccctcacaggcggactccgggagagtgacgcggcgcggctcccaggtgcaggccgggtgactctgtccgcccctgcgccccccgcactagtggcacacgccccgtggccccgggtagcggccccggcccctcaccagcccaagggacgtccccgactctggaccaggcctctggctcccgcctggcgagccgctcttccgggccctggggcggcctcagcgcggcagtacgggccccaggccggcgggacgggcggcgtgaggggcagcggtggcggctttaagtgctgaatcaccactttgcaacccgagcgccaaaccgctgtgacccacggggcccgagggcccgggcgctccattccgcttacccacacaggcgctccggaggcggcaggcgggcgccgaggactgagcggaaggtgctgggcagtgcggggtgcagaagccacgctagccggtaccgcattagccagcgcagtcgccgggatcaccgcaaacgcttcctgcttgcgcttcgagccggccctgcgcactgcgcatgctctagccgcggcgccgcgcggtctcccgggagctgcggagaggtagctgctccgggttttgcctggagccggatggggccaggacgcaggcgaggacggtgaagaccgcggacagccgaggcctgagcaggcggactggagggacaggggtttggccggggcgctttaggagccagcacccagactttcccaggcggggagggtcccagctagatcccaccggccgcacttgtgagggtggcgacgtgtgtctgactgtgagggggcgaggggccgctcataaatccagtgagggcacacggggctatgttttctgaggcacccccactgactagcgtgccggaccctgcaggtgttggaacaaggttcgtggtcgcggcggcctcacgtaaaatgaatccgcggccggcgcgcggcccgcgggctccctctagagcgcggtggggacgtggaccgcgaaggcacagatgcgctggagacaaggctcgagtgcggcgtgggggaaattcagacgcaggggtcagcgatagagaggccaggacccagggggacgtttccatccttggggaagttagcagctctcttaagaggaaggtgcggatgggacgggcgccgcagcaaaacaaggcttcaaatccagagtagaaactactactcttgttagtactccgtactaggaatactactaatgtcagtcggcttcagtggttactttttaaacaaagaattttctccccagtggctttatggggctttgcacccacgaacaacttaatagttgttatgaatctaactttccataataccttatgggagtctttaaggaagaatgctattagggatggtgacttgccagcttaagtacttttaggtttctgattgacagacgatcaagactgcagccaaaaacggtgtccttagtccaagtattgctttaaatgggaattcagtaggagggttccttaatcaagttgatgctttatcgaagacgtacccacgatctttttaacagtgcggtttcacctaaaggcaaacctttggatgaaaacaggtaaaaattatggcaagcctcctagtggtgtttgcaagtgcatggttttaagaacctttaaattaccagtcccaatgcagagtagtcaatcaccttgaagcagctcctctgagagtgttaatgcagcctttctgaatacatttatgctccattaatggaatctataaatgggctggggtagattcagacttggagggcttgaaacatatacaatttgggggacctctttgagacataaaatacaaattataaatacaaaattagcaatcagaagattactatagagagaaaatacatcacaacaaatactcgagacttggagattagtacccttttttttcctgagatctctttaggctacttattagaaatgcttacataaaaatgcttccagatggccgggcgtggtggctcatgcctgtaatcccagcactttgggaggccaagccgggcggataacgagatcaggagttcgagaccagcctgaccaaaatggtgaaaccccgtgtctactaaaaatacaaaaattagccaggcgtggtggcatgcgtctgtaatcccagctactgaggaggctgaggcaggagaatcacttgaaccctggaggcggaggttgcagtgagccaagatcacgccactgcactccagcctgggcaacaaaatgagactctatgtctcaaaaaaaaaaaaaatgcttccagacaacaactggctttccctctacaactcccagtttggagcctgtgcaagtgagcagccctgaagtttaaacttcattagcttcatgataaatttccctctggttggagtagatgtcctggataagaaagattaatattaatatagtctcataactatcatctcaataaagaggaggtggatggaaagaaaagtaacaattttgagagtctactctgtgtctggcattgtacatggctccttcattagtcatcatgaccaccctctgtaatggatatttcctcacctaccagagatgaggaagctgtggcagagagaggttgagtaacttgccaacaattggacaaaaagagtggagttgtaatttgaacccaggactgtcttattccaaaacctgtgatttgctcatctcatttatgacttgacaaatatttgttgaatgccttacagataccaggtattataaaggtgctgggaatacagcagtggacaaaaaagacaaaagtttctgtcttgatggagattaccttctagctgtgtgggaaaaacagataataatcaagtgagtaagtgatatgaaggaacaggtggtcaggaaaggcctctttgaggaagtgacattcaggcagaccccagaatgatgagaaaaagtaggaaatgtgaaggtctagggtgtaatctttcccactctcactcaaacaagtataaggtgtaaaccacctagacaacttttttttcttttctttctttttttttttttgatggagtctcgctctgtcaccaggctggagtgcagtggcgcgatctcggctcactgcaacctccacctcccggattcatgtgattctcctgcctcagcctccagagtagctgggactactggcgcacgccaccatgcccagctaatttttgtatttttagtagagacgggatttcaccatgctggccaggatggtctcgatctcttgacctcatgatcccccctacctcagcttcccaaagcgctgggattataggcgtgagcctccatgcccggcctacaacttttttagaagcagaaaaagtaatgtgctgaagtcattctttgccttagataggaaaactagacacatattcaaatataagtattctgatatactggaagccaaatattagtgtttatctgtgctgtaagttccttccattagcccagatagaatagagttcaccatagagctgagtcaggagttcctaatgattgaaagaaaaaaacttaaaaaggaagcccagtggtgacagattggcgtttatttcctaattggtaatgttcagaaaaataatatcttttgtccccccagatgttttagcagaggaaagaaaaggaattttttttttttttttgaggcgaagttttgctcttgtcacccaggctggagtgcaatggcatgatcttggctcagcgcaacctccgcctcccaggttcaagcaaatctcctgcctcagcctcccaagtagctgggattacaggcatgcgccaccacacccagctaatttttgtgtttttagtagagacgggtttctccatgttgatcaggctggtctccaactcccaacctcaggtgacccgcctgtcttggcctcccaaagtgctgggattacaggcgtgagccaccgcgcccgggcaagaattttttttttttttttttttaaataggccgggtgcagtggctcacacctgtaatcccagctctttgggaggatgaggcaggtgaatcacttgaggtgaggagtttgagaccagcctggctaacatggtgaaaccctgtctctacagaaaaattaaaaaattagctgggcatgatggtgtgcacctgtgtcccagctacttgggaggctgaggcacaagaatcgcttgaacctgggaggcagaggttgcagtgagctgagatcgtgccactgcactccggcctaggttacagagtgagaccctgtctcgaaaataaaacttaaaatgtcttttgagactgggcacagtgactcacgcctgtaatcccagcactttgggaggccaaagtgggcggatcacctgaggttgggagttcgagaccagcctgaccaacagggagaaaacccgtctctactaaaaatacaaaattaactggacatggtggcgcatgcctgtaatcccagcactcggaaggctgaggcgggagaattgcttgaacccgggaggcggaggttgcggtgagccgagatgaagccattgcactccagcctggacaacgagtgaaactccatctcaaaaaaaaaaaatgtcttttgaactaatctagcctattgttatatattcaaaatcaaaatctgaattctgaatccaccaactcaaaattttgtacaaatagctaaagagaaagcatacctaggtagttaataacaaaggaaaatttaaagttagggccagacgcggtggcttatgcctgtaatcccaacaatttgggaggcagaggtgagagggtgcttgagctcaggagttcaagaccagctttggctacatagtcaggccttgtctatataaaaaaataaaaactaaattaggcagcaggtgcagtagctcatgcctgtaatgctagcactttgggaggccaaagcaggaggatcacttgagcttaggagttcgagaccagcctgggcaacatagacctcatctctatttaaaataaagataaaatcaaaacaaaacaaaaaattagccgggcatggtggtgcatgcctgcggtcccaactactctggatgttgaggtgtgaggatggcttgagcccaggaggtggaagttgcagtgagccaaaatcatgccactgcactccagcctgggcaagactgccagaccctgtctcaaacaacaattcttacaagaccttaaacatttttcataaacatcatttttatttgtattattttttaaggctcttgagcaatgccaattctttaatgaacagctgaggaacattggttttagccatcaattttctttttctcaaaagaaaaatgtctcaaaagacattttttttttaattgagacagagtctcactctgtcacccaggctggagtgcaatggtgtggtcttggctcactgcaacctctacctcccaggttcaagcgattctcctgcctcagcctcctgagtagctaggattataggcacctgccaccacgctcagctaatttttgtatttttagtagagacagggtttcaccatgttggccaggctggtctcaaactcctgacttcaggtgatccacccaccgcagcctcccgaagtgctggggttacaggcatgagccactgcacccggccttttttatctttttaaaacggggtctccctctgtggcccaggctggagtgcagtggagtgatctcagctcactgcaacctctgcctcccgggttcaagcgattctcctgcctcagcctcccaagtagctaggactacaggcatgagccaccacgccctgctgatttttttgtatttttagttgagactgggtttcaccatgttggccaagctggtctcgaacccctgacctcaggtgatctgcccacctcggcctcccaaagtgctgggattacaggcatgaaaaccaccgcacccagccttattttatgtgtcttaattttctcatttatctctctcactaacatgtaaataccacaagcatagaaacctggttgctcttttctctggtgtatcctcaacattgaaagcaagccctgggcccataatatttgttgaatgcataaatcaagagttgtcttaactgtgtgtggaaaatacgaattatagatcctgcccataaagtaactcaaatttacctttaaggactagcaaagatgagtcatttaggaaaactcctaacaaacaaatttataattaatcacttatctataaaacatttttaaaaattcatgttgcttttaggtattttattaccatagtattgtacttaaaactaatatacattttaaaactttttattgggaggggcacggtggctcacgcctgtaatcccagcacttggggaggctgaggcggatggctcacctaaggtcaggagttcgagaccagcctggccaatgtgatgaaaccctgactctactaaaaatacaaaaaattagccgggtacagtggcaggcgtttgtagtcccagctacccaggaggctgaggcaggagaattgcttgaacccaggaggcagaggttgcagtgagccaagatcatgccattgcactccagcctgggcaacaagagcaaaactctgtctcattaaaaaaaagaaaaaaagaaaaaaagctgggcatggtggctcacgcctgtaatcccagcactttgggaggccgaggtaggtggatcacctgaggtcgagagttggagaccagcctgaccaacatggagaagccccgtctctattaacacaaaattagccaggtgtggtggtgcatgcctgtaatcccagctactcaggaggctgaggcaggagaattgcttaaacctgggaggtggagagtgcagtgagctgagattgcgccattgcactccagcctgagcaacaagagcgaaactctgtctcaaaaagaaaaaaaaaaagaaaaaagagaaaactttgtattatggaacaagtagtcaaacataaacaaaataaaagaaaatagtataactattccaggcaaaatatgattttagaattctatagcccaataatgtcaacatagattttgtgatttaggataaaaacattttgaaaaatacgattttagaattccacagccaaacaatgtccataaataaataccccaggcatccattcattattcagcttccataattaccagttcatggccaatattgttctatcttttcctccaactccctcaacctccactaaattattctgaaccaaataccgggcatcatattattaatatttcatctcagtatttcagtatatgtctcaaaggacttaaagaaaatccacaggcactaacatacttaaaacattaagataattatttaatataatcaaatatgtagtcagtgttcccactttcctgagtgttcccactttcctgattgcctcaaatgtttctttttcacaatgggtttgttcaaatcaggatccaaacaagaacaaaacacttcatttaattaatatgtttcctttttttattttgttttgtatcttttgaagatgatcttttttgaagagtttattgaagtattgcaaacagaaaagtaaacaagtgataagtgtacagctcagtgaattttcaaaaactgaacacatccctgtaaacacacccagaagctctgccttattctccgtttcagtcactgtcaccccaagggtaaacactaacctgacttctaacacaataaattagttttgcctggattacagtttaatataaatgcactcatacagtatatactcttttgggtctggctttgtttaactatctggtgagatttatccatattttttagaataatttttgtttgttcactttcttttcttttctttcttttctttttttttttttttttttttttgagacagtctcactctgttgcccaggctggagtgcagtggcgtgatttcaactcactgcaacctctgcctttcaggtttaagtgattctcctgcctcagcctcccaagtagcttggattacaggggcccaccaccatgccctgctaatttttttttttttttttagtagagaccgggtttcacaatgttggtcaggctggtcttgaactcctgacctcagatgatcctcctgcctcagcctcccaaagttctgggattacagacatgagccaccgcgccggcctgtttgtttacttttttttttgagatgaagtctcactctgtcagcaggctggagtgcagtggtgcaatcttggctcactgcaacctccgattccctggtttaagcaattctgtctcaacctcccaagtagctgggattacaggcatgcgccacaatgcccagctaattttttgtatttttagtagagacggggttttcactgtgttagccaggatggtctcaatctcctgacctcaggtgatccacctgccttggcctcccaaagtgctgggattataggcgtgagccaccgtgcctggcccatagcttgtcaattctaaatcttttatttatttatttatttatttatttatttattttgtttgtttgtttgagacggagtcctgctctgtcacccaggctagagtgcagtggcagaatgtcggctcactgcaacctctgcctcccgtgttcaagagattctcctgcctcagcctcctgagtagctgggattacaagtgcatgccactatgcctggctaatttttgtatttttagtagagatggggtttcaccatattggtcaggctggtctcaatctcctgaccacacaatccatccggctcggcctcccaaagtgctgggattacaggcatgacccaccacgcctggccaatttttgtatttttttagtagagatggggtttcgccatgttggtcaagctggtcttaaactcctgacaggtgatccatctgccttggcctgccaaagtgctaggattacaggcgtgagccactgcacctggcctctccctcctcttttttattttgcaatttatttgtcaaaggagttgagtcatttatcctatagtgttcccaacattctaaattttgctgactgtattctttttatttttatttttttgagatggagtttcgctcttgctgcccaggagcaacaagaggagtgcaatggagtgacctcggctcactataacctccgcctcctgggttcaagtgattctcctgcctcagcctcctgagtagatgggattacaggcgtgcaccaccaagctcggctaatttttttgtattttttagtagagacggggtttcaccacgttgcccaggctggtcttgaactcctgacctcaagcgatccacccgcctcagtctcccaaagtgctgggattccaggcgtgagccagcgtgcccagcctgctgactgtattcttacaatgtgacttaacatgtttgtttcttatatttcctgtaaatggtagttacatccaccgatttgatcagattcagcaaatatgcatttgagaagtgtttactaagcactgtgcttgctgctaggtgggatacaaaaatgactaagacatcactcctaatctattgtttattatgaatatgaaaggttaaggccaggcgtggtggctcacacctgtaatcccagcactttgggaggctgaggcagctggatcacttgaggccaggagttggagaccagactggccaacaatgcaaaatcccgtctctactaaaaatacaaaaagtagcggctgggcgcggtggctcacacctgtaatcccagcactttgggaagctgagacaggcggatcacctgagatcaggagttcgagaccagcctgaccaacatggagaaacccccgtctctactaaaaatacaaaattagccgggtgtggtggtgcaggcctgtaatcctagctactcggaaggctgaggcaggagaatcacttaaacctgggaggtggaggttgcagtgagctgagattgcacccttgcactccagcctgggcaacaagagcaaaactctgtctcaaaaaaaaaaaaaaaaaaaactaaaaatacaaaaagcagccgggtttggtggtgcacacctgtagtcctagctacttgggacactgaggcagaagactcccttgaatccgggaggcaaaggctgcagtgagccgagatcatgccactacaccccagcctgggtgacagagtgagaccctgtctgcctgtttttttgtttgtttgttttgtttttgttttttctgagactgagttttgctcttgttgcccaggctggagtgcaatgccatgatctcggctcacggcaacttctgcctcccagattcaagcagttctcccgcctcagccttccaagtaactgagattacaggcatgtgccaccatgcccagttaattttgtatttttagtagagacagagtttctccatgttggtcaggctggtcttgaactcccgacctcaggcgatctgccagcctcggcctcccaaagtgctgggattacaactgtgagccaccatgcctggcagggcaggactttttaaattcatttttgtgactatcacagggtatgcacctaagctcagtaaacatttgttgagtaattaaaaccagctaaaggtgtttttgttttttgttttttttgagacggagtcttgctctgtcacccaggctggagtgtagtggtgcaatctcagctcactacaagctccgcctcccgggttcatgccattctcctgcctcagcctcccaagtagctgggactacaggcgcccgccaccacacccagctaattttttttgtacttttagtagagatggggtttcaccgtgttagccaggatggtctcgatctcctgacctcgtgatccacctgcctcggcctcccaaagtgctgggattacaggcccgagccaccgctcctggcccccattttttttttcaagataagatcttgctctgtcacccaggctggagtgcactggtatgataatgactcactgcagcctcacctcccaggctcaagtgatcctcccagctcagcctcccgagtagttgggaccacaggtgagtgccaccatggctgagactattttcattttttgtagagatgaggtctggagagtcttggaagaattcttacgttaaataaaaattcaggatgcaaaattctatatccaggttgagcatagtggcttacccctgtaatcccagcacttaaggaggtagaggcagaatgatagtttgagtccacgatagtttgagtccaggagttcaagacctgcctgggcaacatagtgagactctgttctccataaaaagggggggaaagaccaaaaaaaccctatatattcaattatgatctcaattactgaaaatatacaaatagacaactggaaagaaatacatcaaaatattaatggtagtaattgctgggtggtagaaatctgctatctctatacaggagttccagaaagaaacaacagacgtggcaagtgaaatagtcaatgaataattcaaaaacatttcccagactgaaggtaacaacttgccagactgtggctcagcccaattaatgaaagtagatgcacacattggctgggcatggtggctcacacctgtaatcccagcactttgggaggccaaggcgggcggaccatgaggtcaggagatcgagaccatcctggttaacatggtgaaaccccgtctttactaaaaacacaaaaaattagccgggcgtggtggcgggcgcctgtagtctcagctactccggaggctgaggcaggagaatagcgtgaacccaggaggcggagctttcagtgagccaagattgcgccactgcacccagcctgggcgacagtgtgagactccgtgtcaaaaaaaaaaaaaagaaagaaagaaagtagatgcacaccaaggcacatcattgcaagatttcttttttttgttttttgtttttttttgagacagcatctcactctgttgccccagctagagtacagtggcacgatctcagctcactgcaacctccacctcccgggttcaagcgattctcctgcctcagcctcccaagtagctgggactacaggcacgcgccaccatgcccggctaatttttgtatttatagtagagatggggtttcaccatattggccaggctggtctcgaactcctgacctcgtgatccacccacctcagcctcccaaagtgctgggattacaggcgtgagccaccatgcccagctgcaagatttctttctttttttcttttctttttttttttttttttttttttttttttgagacggagtcttgctctgtcacccaggctggagtgcagtggtgcaatctcggctcactgtaacctccacctcccaggttcaagcgattgtcatgcctcagcctccaagtagcttggattacagacgtgcatcaccacgcccagctaatttttatatttttagtagagacacggtttcaccatgttggccaggctggtctcaaactcccaacttcaggtgatccacctgcctcgggctcccaaagtgctgggattacagacatgagccgccacaccccgcctcattgcaaaatttctagtcactagaatgaaatgctcagctatgaacagacataatgacctgaatacagataattgatttaaccagaaattgtaatattgggtattagagaaggaaatgcagagaggatggtaaagtttgagaactaaacctcacctaccataagatgtcaataaataatgtctaaaatggattaatcaaaagataacggtataggtctggcacaggggtggctcatgcctataatcctagcactttggaaggctgaggcggaggattgcttgagtccagcagcttgagaccagcctgggtaacaaagcaataccctgtgtctatgaacaactttaaaaattactgggtgtggtggtgtgtgcctgtagtcccaggtactcatgaggctgaggcagtaagatcacttcaactgatgcagttgaggctattcaggaggtggaagtggactgctggaacccaggaggtcaagggccaggcgcggtggctcatgcctgtaattccagcactttgggaggccaaggtgggggaatcacttgagcccaggagttcaagaccagcctggacaacaaagtgagaccctgtctctacaaaaaatagaaaaaaatttgccaggtgtagtggcatgtgcctgtggccccagctactcaggaggctgaggcaataggattgcttcaatgggagcagttgaggctgcagtgatacctgatagagccactgcactctagcctaggcaacagagtgagaccctgtctcaaaaaaataataaataaataaataaatacaaataacagtatatacaaattccttatgaaaatagaaatgtgtaaatgccagcaaaaacaactaaagtggttggttgtttctggggtaaaggtctagaggcattggtgtggaataaggctgagaaaatactttttttgttgttgttgttacaagccttttagaactatttaactttataaaacatttccacgtttttcttttcttttcctttctttcctttctttctttctttcttttttttttttttgagacaaagtcatactctgtcacccaggctggagtgcagtggcatgctcttggctcactgcaacttctgcctcccaggttcaggcagttctcctgcctggtattacaggtatgagctgccatgcccagcctccatgtttttctttaagaaaaataaaaatcaatttaaaatagtttattcgagaagtacatatactcctgaaagagaaatgccagagcaaacacgtgggcaacgatgttgcattgttagaattcagtttaactagacttaaattattattattattattgagacggagtcttgctgtgtcgccaggctggtgtgtagtggcgtgatctcggctcactgcagcctctgcctcccaagttcaagtgattctcctgcctcagtctcccgagtagctgggaccactggcacacgccaccatgctaaatttttttttttttttttttgtatttttagtagagacaaggtttcaccatattggctaggatggtctcaaactcctgacctggtgatctgcccatcttggccttccaaagtgctgggattacaggtgtgagccaccacacccggccccagctaatttgtttgttttgagatggaacctcgctctgttgcccaggctggagtgcaatggtgtgatcttggctcactgcaacctccacctccagggttcaagcgattctcctgcctcagcctcccaagtagctgggattacagtcacgtgccatcacacccagctaatttttgtatttttagtagagatggggtttcgccatgttggccaggatggtctcgaacccctgacctcaggtgatctacctgccttggcctcccaaagtgctgggattacgggcgtaagcctccgtgcccagccgagaaatgttgattattaggctgagtagtttgaactcaacaaaggcaatgtaaaatgacatttcagggactgcttagtgcaacaaaacacttacatggggccattagaccctaactatctctattagacttagccctgagggcaagtacaataattcagcctgtatattcactgccaggcccacagtaagcatttcaagaagagtatgagaaaagtggatgtgaccaggcatggtggctcatgcctgtaatctcagcactttgggaggctgaggtgggtggatcacgaggtcaggagttcgagaccatcctggccaacatggcgaaacctcgtctctactaaaaatacaaaaattagctgggtgtggtagcgcgtgcctgtaaacccagctattcagaggctgaggcatgagaattgcttgaacccgggaggcagaggttgcagtgagccaagattgtgccactgtactccagcctggcgacacagcagtactccatctcaattaaaaaaaaaaaaaagaatacatgtgcacttagcaaatgaaaaaaactcaatgggaaagacagtagttaagaacctgggagttggaatgggaaagaattctaagttccttccctaatagttaaccttatactatgattaaagtgtaagtacagtgatatgctgtatgactacagacaaacttatttggctagtttactgataaaatagtagaaaataatagttcctacttcacaaagttgttctgaagattaaatgagatgatacacacaaagcctttagcatggagtctgactcacagtaaaccctaggtaaatggtagctgtatctattatcaaatggagactcttgaatttcttgcgtcaacccatgtgactgttaacatatatattgtttgaatatttgctaaagagaaaggaaagacggcccagcagggtagcttatgcctataattccagcagtttaggaggctgaggtgggaggattacttgagaccaggagttcaagaccagcctgggcagcatagggagacccccatatctaccaaaggaaaaaaaaattagccaggtctggtggcttgtgcctatagtcccagctactcaggaggctgagatgggaggatcccttgagcccaggaggtccaggcttcagtgagccgtgatggtgtattgtactccagccttggtgatagagcaagaccctgactcaaaaaaaaaaaaagaaagaaaaggggattttttttttttttgagacagagtctagctctgtcacccaggctggagtccagtggtgccatctcggctcactgcaacctctacctcctgggttgaagcgattctcctgcttcagcctcctgaatagctgggactataggcgccctccaccacacctggctaattttttttgtatttttagtagagacggggttttaccatatttattggccaaactggtcttgaattcctgaccttatgatctgcccatctcggcctcccaaagtgctgggattaaaggcatgagccaccgtgcccagccagtgtactttatatgtatcccaggtactttatatgttattttaatcctcacaataatagtaattattattatctccattttacagataaggaaaccaaggctgatagaggtgaagtaatttccttcaggtactcaatatatatttattgagtaaagccttactttggtgtaaggcttgttcaagacactgggaaaataatactgaacaaaaagacagggtccctaatgaaacttacattctatccagggagacacacaatatattgacaatataatatattgtcaatacacacaatatattgcctgtagtgttatgaagaaaatagacagggttctgagatagaaggttataagaggaaggccaggtgcagtggctcacatctgtaattccagcactttgggaggccaaggagggcagattacttgaggccaggagttcgagactagcctggccaacatggtgaaaccgagtctctattaaaaatataaaaaaaaattagccgggcgtggtggggcacttgtaatcccacctattcaggaggctgaggcacaagaattgcttgaacccaggaggcggaggttgcggtgagccgagatcccgccactgcacttcagcatgggggaccaggacaagactccgtctcaaaaaaaaaaaaagaaaattatgaagaatgtgctttagatagggtggtcagaagaggtgtttttaaaagaaaaagttcaactgagagctgaagaatgagatgggtaagccatgcaaagagccaaacagagttcagggcagagggtacgtcaggtacaagggcctggccacaggaaaaagctaggagctctgaagcatggtaatgagatttttggaaagtgcctttagttggtggtatggacaagggccagatcatgaggaccctacagagcatggtaatgagtttggatttaattccaaatacaaatgagaaggtaatgtaagattaaaaagcagatgaagagcataatcttattttcttatttcttaaaagacacttcccttgctgagtaaatgtagtggaggagttgggggtaggagaaaagggcagaagagaaacttgttaaggaggtagatgacatttgttcagggaagagataagagccttgtactagggtgatcatcggaggggagataaaatcaacaggactccactacacgtggaggaatcaaaggttctggttagcaccagtatccagatgagaaaagattagggtggagataggtcccattttgaaatgccagcgagccacctaagaggagatatcaatagacagctggctactcaaaatagagatgaccagcagaaggagctgtagatgcagttatttccttggggcgggttgtgcgggggggcgcatgtaggggattagcaagtggaggaacacaaaaaggacatcagagctttccactacaccgggttgttacttaatagactaacacgacatttaggttcccatgggttgtgtgggccagaagcgcagttccaggaaccgactacaacatagtgtgggatatgatgtttctcttcaaataacccgatcaatcttttattctttaattcatagtaccctcccttttttctctttttctccttttttgcttttgttaaatgcccaggcacgccacaatactaggccttatcaataccagctcacattcctttccttatttgaagggactaactttttagctcattacagacaccccttcccctttcctgtccgctttcttttaagtacccaccttagctaaaaaaaatcaaatgtttagccaaccgggattagtttagattatacgacccgaccccagccaatgggaaaaagatacaggggcaggacttgcgtcaaaaatagactcctgcccctttgttcaggtgtgctctcaaggcgactggccaaaaaggcacccctctgcgcaaaaataaaattgctttgctaaaaatcctttgttcaagtgttcaatttccttaagattttaaaagttattcataacaataggctcctgtttcagtatttcctggtgcggcgtaccacacctacagcggtcgagtcacgccaggcactgccaagacgccgaaaagttctcccgcagcaggccggaggtgaccgacggcgcgcaggccccagcgagcgctgcatgctgggatccgtaggccggggcggcggatgtttgcgcagcttccttgagatgccaccgcccgctgcgccgcgcagaaacggggagcgcagcgcacccgcggcctgcgtcactcggtcagtgcagtcgttctaaaatcgaggcggaccctgctttcttgcctggagtcacttagagatgatgactaaaggataaattcagagtcctccaaatggcgtccagtgtccatttcatcacgatttggaacctgtagtagccttatcgcttaacacttcctaattattattattattattttctttttgagaaagggcattgctctgtcgcctatgctggagtaatccagcgacataatcccggctcactgcagcctctatctcccgtgttcagcgatccttcttcctcagcatcccgagtagatgggaccaaaaggcacgcatcaccacaccaggctattttttcccctctattttttgttgagacccgttgggaggcgcggggaggggggtctccctatgtcgcccagactggtctcaaactcctggaacttaagttatcgtcctacctcggcccgttaaagtgttgggattacaggcctgagccaccgggccccaacattaattattcttcaagcctattctggaccgggcgcggtggctcacgcctgtaatcccagcactttgggaggccgaggcgggtggatcatctgaggtcaggagttcgagaccagcctggccaacatggtgaaaccacatctctactgaaaatacaaatattagccgggcgtggtggcacgcacctgtaatcccagctactcgggggctgaagcagcagaatcgcttgaacctgcgaggcggaggttgcaatgagccgagatcgcgccactgcactccagcctgggtgacaagagcaagactccgtctctcacacacacacacacacacacacacacacaaagactattctggtctctgcctccgggatggcggctcgctttggacctctcttctgtgcttctactgccctctcttacaattctctaataattataatcatggcgagtgcttaccatatattccaatctatttacttccacaagctcattaattctcaccctaaccctctgagatggttactattatttcctctctgcagctgagggaattttgggctagggacgttatgtaagttgagccacgctacgctaaaagttccacactcaattctagcgtctcggctctggactaccaagttccggagcaagcagacagaccacctctttacgttcccgtaggccacgctccgggggcggggctccagtgaggatactgcatcccatggtgccttgcgcgccagcgcagccattggtccggctactctgtctctttttcaaattgaggcgccgagtcgttgcttagtttctggggattcgggcggagacgagattagtgatttggcggctccgactggcgcgggacaaacgccacggccagagtaccgggtagagagcggggacgccgacctgcgtgcgtcggtcctccaggccacgccagcgcccgagagggaccagggagactccggcccctgtcggccgccaagcccctccgcccctcacagcgcccaggtccgcggccgggccttgattttttggcggggaccgtcatggcgtcgcagccaaattcgtctgcgaagaagaaagaggagaaggggaagaacatccaggtggtggtgagatgcaggtagggagagggctgacaggattccgagcgctgcggcttcgctgctgggccccctactgcgcggtccagggagagggattttatttgcatttcctgagggtcccagtttcttggttctccgcgttctgttcaataaaaatgacacccggttgctgtgtgtatgtggtttttaggagaaaataacatgtttgatttgatcactgttccatactgaaaagtgcgttcttatgtttaaactatagtcaataaagatgtaggtgtcacttttatatgctacttcatgtagtttgtcagtttggaagtaagactgaatacctattttgcagatggttaagcacttacgttggtattattacctctaaaaagcaatcaatcactgttctctttattctagatgcaatattttctgcatccctactaaacaagtaaacatctctgtctttaaacattaaaaattaataaagtgagtttatgttttttaaaagatcaagacaagttaagctagtgtaaatttctgattgtgctgcagttttccctttcatctgcgtgtttgttcatagaccaaactaaacggatatttcgagataaagggatgtggaggggtgttcggccctcccctgactggtttccaaataacttcccaattttaaaataagctagaaactgctgcttagttagaattgatttattcaactttttagaggctctccacagtttactgagtatgtgtgttttgtgtgtccgtttttgtggctgttaacagttgctgttgcaacttttctgtaaaccccaaagtattctaaaattaaaaggttattttttagaaaaacttgtatcaacaaactttcttaggctattgtttactcagccctggtaacttgaattgtggatatcgaaggtgatgactaggtttctaaacaaggtgtcagagaggaaattgggtggcaatcttaagtctagccagtgacacttactagttgttgtactctggggcttctgttagtagttagttgtttgaagatttttatttaaaaatgcagtgcatataacaagtgcaaattttaaaattattttggttgtttaataaaaccaggcaatattaccttttccgtatgcatttatttaatttcttttttaatgttagttacaaaatatttcagacttacaaaaagttattaagaacaatgtaataaacatttgtatattcatcacccagattaagaaacaaaacaatcattgctggagccccccttttccctctccatcccttttcctccagccactgttaaccattatcttgaacttgatgtttatgatccgtatacatttcaagtcttagaagagatttactttatcaccaatgaatagaatagttctttgcttgtgtctaatatttacaataatttttgtgtaaagagattttttttttcagattagcctttttctttcaaatagccttcctggtgcgtctgtcattaagcattaagctttagtaaataggcaacttatgagttgcgaggtcctcaggggttggtaagccttttctgtaaagggcccagagaaataaatatttattttatttaaatactttaggctttgcagatcacatgtggtttatcagttttttttgagacggagtctcgctctcttaggccgtagtgcagtggtgcaatctcagctcactgcaacctccgcctcccggattcaagcaattttcccacttcagcctctcaggtagctgggattacaggcgcacaccgccatgcctggctaatttttgtatttttagtagagatggggtttcaccatgttggccaggctggtctcgaactcctgacctcagagaatccacccaccttggcctcccaaagtgctgggattataggcgtgagctactgtacccctttacatgtggtttctgtcacattattttctgatctttttttttttaagaacactttaaaactgtaaaaatcattcttaaatctgtcagggcaggggccaggtttgacccacaggttaaagtttacagatccctacataatgcgctactggttctctttcttatgtccctcctattccatcccctatttttttcccaatttaaaaagtcattttcaaacacacataatataaaatttaacatcttaaccacttttaagtgtacagttcagtgatattaaatacataatattctgcaacaattactaccatccatctccataactcttttcatcatgaaaaactgaaactctatacacattaaacaataactccccatttccctctcccatcaacccgacacctaccattcgactgtcttatgattttgactactctaagtacttcataaagtggagtcataatacagtatttatccttttgtgacttgctcattccacttaggcataatgtcctccaggttggaccatgttgtagcaaatgtcagggttttcttcctttttaaggctgcatagtatttattatatgtatataccacattttgcttgtcccttcatatgtcaatggatacttgagttacttctttttttgttgttgttgtttttgagaccgagtctcgctctgttgcccaggctggagtgcagtggcgcggtcttggctcacactgcaagctccatctcccgggttcacgccattctcctgcctcagcctcccaaggagctgggactacaggcgcctgccatctctcccggctaattttttgtatttttagtagagacggggtttcaccatattagccaggatggtctccatctcctgaccttgtgatctgcccgccttggcctccctaagagccgggattacaggcgtgagctacggagcccggccttgagttacttcttacttttagctattatgaataatgttgctatgaatatgggttttcaattcttttgggtatttacccagaattgtaattgctggatcatatgataattctattttaaagtttttgaggaaccgacaaactattttccacagtggctggaccattttacattcctaccaacagtgcataagggttccaatttctccacatcctcaccaacgtttattttctgtttcttttttttttttcaagtagccatccattgggtgtgaggtgctatctcattgtagttttgatttgtatttccctaatgattaatgatgttgagcatcttttcatgtgtttactggccattttgtgtatctttggagaaatgtctgtttaagtcctttgcccatttttaaattggtttgcttttttgttgttgagttttaggaattttctatatattttggatattttcagatacataaacggcaaaaattttttccccattactgtggtttgcctttttactcattgataccgtgtggtcttttcctttctttttctttttggaaccagtgcatggcctctttgttgattctgtgtttggccccagtgcagcctgttctgtgctatgtgtctgcagtgctgaaaccaggcctacccagcaccatacagaagtccaggctgtagataccaatgcatgggtcacatttgatacccaaatctgtgtgttcctggatctccaaaccaaagtttccagtatctgagaagttgttctttcttgattcacactcctgcatctttagacctttcttcagggtttcttctgctttggccctttgtgcagtgggtggcaatcttcacttctcctgatgccaaaggatctgacaatgtatttgactttggagaacacaggggtctggcctatgagctgctccaacaccttggctgctggggtcagtcatctccagtctcctccatacagatgttgagacagaaaatcgttctgtcacccaggctggagtgcagtggcacagtctcggctcactgtaacctctgcctgtcaggttcaagcaattcttatgcttcagcctcccaagtatctgggattacaggtgtgcaccaccatgcctggctaattttttgtatttttagtagagatggggtttcgccttgttggccaggctggtcttgaactactggcctcaagtgatccacccattttggcctcccaaagtgctgggattatgagtgtgagccctcatctggccagagttctcttttttttaccttgatcttgcactatgatggagaaaaggaagataaagtctttttttttcccttgggtttgtttgtttgtttgtttgtttgttttttgagacggaattttgctctcgttgcctaggctggagtgcattggtacgatcttggcttactgcaacctccgcctcctgggttcaagccattttcctgcctcagcctctagagtagctgggattacaggcatgcgccaccacgcctggctaattttgtatttttagtagagatggggtttcaccatgttggtcaggctggtcttgatctcctgatctcaggtgatccgtccaccctggcctcccaaagtactgggattacaggcgtgagcccgtgcctgggctattttttttttctcccctttaaatatagtatcttgctttattgcccagacttgttgtgaactcctggactcaaatagtcctcctacctcagccttccaggtagctgggatcacagggatgctgtcttttgatacacaaacattttaaatttttatgaagtccagtttgtctttttgtttttgttccctgtatctttggtgttatatccaagaaatcattgccaaatccattgttgtgaagcttttgccttatgttttcttctaagagttttatagctttaggtcttacatacatttttgatccattttgagttaatatttgtatattgtgttagataagggtccaacctcattcttttgcatatggatatttagtttcccagcaccatttggtgaaaagcttgtctttttctgattgaatggtcttggcaaccttattaaaaatcatttgctcatatgtaagagggcttatttctaagtgctgttatgttccattggtctataagtctgtctttatgtcagtaccacatggttttgattattgcagctttgtagtaagttttgaaatcaggaagtgtgagtcctccagctttgttctttttcaagattgttttggctatctggactcccttgggattccatatgaatttgaggatgaatttttctatttttgtaaaacacgtcattgggattttaatagggattacattgaatctatagatcactttgggtagtattggcatcttaacaatattaagtctttcagttcatgaacaagggatgtgtttccatttatttatgccccttaatttctgccagcagtttttttttgtttgtttttgttttgagatggagtttcgctcttgttgtccaggctggagtgcagtggcacaatcttagctcattgcaacctccacctcccgagttcaagtgattctcctgcctcagcctcctgagtagctgggattacaggtatgtggcaccacgaccagctaatttttgtatttttactagagacaaagtttcaccatgttggtcaggctggtcacgaactcttgacctcaggtgatccacccaccttggcctcccaaagtgctgggattataggcgtgagccactgcgcctggcctcagcagtgttttatagttttcattttataagtctttcacctccttggttaaattaattactaatattttattctttttggtgctattttaaattgagttgtttttgtaatttcctttttagattgttcattcttagtgtataaaaatgtaactggaggctggacgcagtggctctcacctgttatcccagcactttgggaggcaaggtgggcctcccaactcctgatcacgagatcaggagttcaaggccagcctggccaacatagtgaaaccctgtctctactaaaaatacaaaaattagccatgcatcgtggcgcgtgcctgtagtcccagctacttaggaggctgaggcaggagaatcgcttgaacctggaaggtggaggttgtggtgagccaagatcgtgccactgtactccagcctgggcaacagagtgagactctgtctcaaaaaaaaaaaaaaagaaaaaagaaacgtcgctggattttgcttgttgactttctatccagctactttgctgaattcacttattagttctaacagtttttttttgtgtgtgtgtaattttagagttttcttttctttttttttttttgagatggagtctcgctttgttgccaggctggagtgcagtggcgcgatctcggctcactgcaacctctacctcccaggttcaagcaattctcctgcctcagcctcccgagtagctgggactacaggcacacgctacgacgcccagctaatttttgtatttttagtagagacggggtttcaccatgttggccaggatggtctcgatctcttgacctcgtgatccacctgcctcagcctcccaaagttctgggattacagccgtgagccactgtgcctggcttttttttttttttaattaactattgaacttctgtttattattattattattatttatttatttattattttttgagatgaaatctcggtctgttgcccaggcgggagtgcagtggtgtgatctcggctcactgcaacctccgcctcccgggttcaagcaattctgtgcctcagcctccggagtagctgggattataggcgctcgccaccatgcccggccaatttttgtatttttagtagagatagggtttcatcatgttggtcaggctggtcttgaactcctgacctcgtgatccgcccgcttcggcctcccaaagtgttgggattacaggcgtgagccactgcacttggccttatttttattatttttttcatcaacttttaagttctggggtacatgtgcatgatgtgcaggtttatcacataggtaaacctgtgccatcacagtttgctgcacagatcaacccatcacctagctattaagcccagcatccactagctattcttcttgatgctctagctccttttgccccactgaattttagggttttctttcttttctatttttttttcttttgagacagactctcgctctgtcaccaggctggagtgcagtggcacaatcttggctcattgcaacctctgcctcctgggttcaagcgattctcctgcctcagcctcccgagtagctgggactacaggcatgcgcccatgcctagctaagtttttgtagttttagtagagacagggtttcactatgttggcaaggctggtctcaaactcctgacctcaagtccccttggggttcctgaagtactgggattataggtgtgagccaccacgcccggccagattttctatataaaagatcatataatctgcagacagataattttactttttccttttctttctttttttctttttttgagatggagtctcgctctgtcgcccaggctggagcgcggtggcgccatctctgcttactgttacctctgcctcctgggttcaagcagttctctgcctcagcctcccaagtagctgggattacatgcacatgccaccacgcccagctaatttttgtatttttagtagagatgggagttcatcatcttggctaggctggtcttgaactcctgacctcgtgatccatccgccttggcctcccaaagtgctgggattacaggcatgagccaccgctcttggccctcaaccttttccttttcaatttggatgccttttatttttatttttcttccttttttttttgagatggagtctcgctctgttgcccaggctggaatgcagtggtgcaatctctgctcactgcaacctacgcctcctgggttcaaacgattctcctgcctcagccttccgagtagcttgtactacaggcatgtgccaccataaacagctaattttttttttttctcgtatttttagtagagacggggtttcgccgttttagccaggctggtctcgatctcctgacctcgcgatccgcctgcctcagccttccaaagtgctgggattacaggcgtgagccaccatgcccggcccttgtttttctttcttgcctaattactctagctagaacttacagtattatgtcgaatggaagtggcaaaagtgggcattgggcatccttgtcttgctcctgttcttttatttgttagtttgtttgagatcctcctgcctcagtttcctgagtagctgggactatagacacactactacacccagctaattaaaaaaataattttttttttttttttagagatggggtctcgctatgtttcccatgctgatcctgaactcctggcttcgggtgatcctctactcttaccctcccatagtgctgtgattacaggcatgaaccactgtgctggccctgttcttgtttttagaggaacattcttcagtctttgaccatcaattatgtttgctgtgggtttttcatatgttgcttttattttgttgaggtagtttcactctattcctagtttgttgagcatttttatgactaatgggttttgaattttgtcacatgcttttcctgcatcgattgacatgattctgtggtttccttcattctgttaatgtggtatattacattgatcaatttttacatgttggaccatccctgtattccaggaataaatcccacttggtcatggtgtataatccttgtgctgctcagttcaatgtgttggtattttgttgaggatttttttttatcagtgttcataagggatagtgatctgtagttttcttgtagttgcctttgtctggctttggtatcagggtaatgcttgcctcacaaaatgagttgggaagtgttctctcctttgccagattttttctgggaaaagattgagaagaactggtattagatcttcttgaaatgttttatagaattcacctatgaaactatcagatctagggcttttctttgtcaggagatttttggttagtgagtccatctctttactggttatagctccattcagaatttccatttctttgtgatttagtctttgtaagtattgtgtttctaggaatttgttcagctgggttatccgatttgttggcatacaattgttgaaaatactctttcaacaataagagagaagacacaaataactagttcttttgtttccagttccttaagttgtaaagttagggtgttgatatgagatctttcttgctttttaatgtaagcattcatagctataaatttcccccttagcactgcttttgctgtgtcccgtaagttttggtatgttgtattttcattttcattaatctctaaaattttctaattttccttgtgatgtctttgaaccctggttacttaaacacacacacacacacacgtgtgtgtgtgtgtgtgtgtgtgtgtgtgtggttttttgtttgttttgagactgagtttcgctcttgttgcccaggctggggtgcaatggcgcgatctcggctcactgcaacctctgcctcccggttcaagcgattctcctgtctcagcctccagagtagctgggattacaggcgcctgccaccacgcctggctaatttcacacacacatttaaaaaatacatctacctgcttttacttcagaatctttgcaatttctgttctctctgcctgaaaattttttccaccaaaatatctacagggcctggctcccttgctttttaggttctgcttaaatatcacctgcgtagaagcattccctaactaccctaaaatagcaaccaactatcttccaccctcaacacttcctatcccccttaaactgctttcttttcttttctttttttttttttttttttgagacagagtctcgctctgttgcccaggcctggagtgcagtggcgcattcttggctcaccgcaacctccacttcagcctcccaagtagctgggactgtaggtggctgccaccatgcctggctaatttttttttttttgagatggagtctcactctttcacccaggctggagtgtagtggcacagtctcggctcactgcagcctccatctcccaggttcaagtgatttctggctaatttttgtatttttagtagagatgaggtttcaccatattggccagggctagtttcgaacttctgacctcaagtgatctgcccaccttggcctcccaaagtgctaggattacaggtgtgagccactgtgcctggcctaatttttgtatttttaatagtgatgggtttttactatgttggccaggctgatctcaaactcctgacctcaagtgattcacccacctcagcttcccaaagtgctgagattacaggcgtgagccactgtgcctggcctgctttattttcatttctaatttatcagcatctaatatatttattcattttatagtcatctcttccttcaactaagttaaaagctccctgagcacaggattttggtgtttttttctttcctttaactttgtattgttcattgctgtatctccagtgtctagaaaattacctatcacatagtaagtacttgatgaatatttgtggaatgagttaatttagcacttctccacaggataggacttaggtttttttaatcctcaatctcccttccctcaccattttgattgtttgaatttttatataactatggtgaagccaacaaattgatggatttgttagtgtgagcagccgaaactttgcaatttctaataagttagagaagtctgggtaggaaactaatgacttggcagtactctttcttagagtacacatagtccctaaagcttctctgagaattttgataactttgaggaatgtgtgatctgtatgaatttcctatcacttagtcctgacaatgtgaatggtattcatttggtaacttaattttatacgtccaggcaagatactagtttaggggatgccaaaaataatagactaattggaaaagctttagccacatgagagcaattcactccacttgatgctcttggcctacctcagtataagttggttctaccttagttttgttgaagttttaataatactgtacattcatgttggttatatgcattgtgtaagttttagtatagttggcaaatgaaagcattaccagatactacctgggagttaagtttcctaggatcacagatttggtcttctgatcacttggaagtatacttagagtgggctgtgccaggggaagttgaggtatccttcttaaataagtagcaacttggtttatctagtgataagggggaaataatttcctgtttggcactttctccaaaatatatgatactcaatgggaaaaatgaactcaggtcaagattatgtctctccctttggcccagacatgtattgagtatataattgtcttattgatgctactctgtggactgtgatattagttttcccataattcctcttaggatgacatttattaggcaatgtagtttaacagatatttaagaacctactgtgtgctaagcatggtagttgttgctggggaaacagtaaactagacagtatttctttctgtagtgatctgaggtttagtgggtaacacattaaaaaaaaaagataagagaggtgatgtttagaaaaggtgtataaagggtgctgtaggaatatatagcagacatttaatgtggtcttggttggagcaggtgggggaggcacataggatagaaaggacttcctgaggaaataatcatttcaactaaatacctactcaggcatttccgtagaatgaggactcttgatccagtcggcagtgtagaccttctgtgtctattcactcatttaaaaatggggctaataatattaccaacctcacagtgttgtgtggacaaactgagtgagcacaatgcaaagcacttgaaacaataagtacctggcacatagtaagtactcaacttattagtcattatttttatgtactttttattttgtgccaggtatctactggcagattagtattttgaacacaaatttgacatgtttttttctactacatcataacctaatttgatcggatttttttttttttttttttttgagacggagtttcgctcttgttgcccaggctggagtgcaatggcgcgatcttggctcaccgcaacctccacctcccaggttcaagcaattctcctgcctcagcctcccgagtagcagggattacaggcatgcaccaccatgcccagctacttttgtatttttaatagagacagagtttctgcatgttggtcaggctggtctcgaactcccgacctcaggtgatccgcctgcctcggcctcccaaagtgctgggattacaggcgtgagccactgcgcccagccttgatcagattttaagaataggagaaatggaattctgaaaaataagtttggcatttttacaagttaaaacctgttagtggctgggcacagtgtctcacttctgtaatactagcaccttgggaagctgaggtgggataatcacttgagcccggaagtttgagaccagcctgtgcaacacagcaagaccccatctctaccatcaaaacaaaacaaatctattcgtatctgctctaagaagctgccagaattgtaatgtcttaacatatctttgaacatttaaaaaattatatttgtgaaacttgagacacttataattttactgtctgctttagcaatatcacttagtcctgatttaatctccatcaccaacaatgtggtcaaaatttcgcatttttcttgacaaatgtagttagtgaaaatgtcattgataacctgagaactaagagctcttgaatgactttgtgtatttctttttatagaccatttaatttggcagagcggaaagctagcgcccattcaatagtagaatgtgatcctgtacgaaaagaagttagtgtacgaactggaggattggctgacaagagctcaaggaaaacatacacttttgatatggtaacatatggtgcaatttctttattatccactaatgtaaaataattttaatatacatattttacctggaaaatggtgtatacttagaaatttcagttgtctctgaattgtcagatggcttctagtgggctgaattatgaattagttaacatacgaaaaacaaaattattaaaatgagtaattttgaggttgatttttttttttttaatttttttcgttaggtgtttggagcatctactaaacagattgatgtttaccgaagtgttgtttgtccaattctggatgaagttattatgggctataattgcactatctttgcgtaagtaaaagggtgttttttctgatttatgaaaaagcttaaatgcttgtgttttttgttgttgtttgtttgttttttgagacggagtttcactcttgttgcccaggctggagtgcaatggcgcgatctcggctcactgcagcctctgcctcctgggttcaagcaattctcctgtttcagcctcccaagtagctgggattacagctgcctgccaccatgcccgctaatttttgtatttttagtagagacgtggtttcactgtgttggccaggctggtctcgaactccggacctcaggtgatccgcccacctcggcctcccaaagtgttgggattataggcttgagccactgtgcctggcttgttttttgtttttctagtctatcactaagagtcatatgggtgcatgtttctttttgatttaacacttgttaatctttacaggtatggccaaactggcactggaaaaacttttacaatggaaggtgaaaggtcacctaatgaagagtatacctgggaagaggtatttattgtttataacatacttttatctctaatgtgactgaaatttaactgtataaaacttgtttgagggcctctgtcttggaatagagatcagagtacctatgtcaaaatgaacttaggataaaccactactacagtaaaattaaagtgcatggtatgactcctgtttaagaaacagcctcaatggaagaggaaggaccaatatatatggcacagttatatgataaaagaggagtctatttatgacagaatggttggagcagaatattgtagaaaagttggaatatgagtgaagcttgaaggcagggagggctttgtattgaaggaatgggtctcagaaagttagcatggccaggggaagtatagtactttattcatgatgatcctaagtgttcaagaaattaagatgaatgtattgtttaatattgcagaaagcatatactatgttttacaaagatttccatgaatttaagtgagtttaataactaagagagagaaccaatactggaagaaagttgaaagaagaccaagacaagttgaactagagctgaagtgttaaaacttttaaaaaaaagtttagttttaaatttagtaatgtgtttaaatttaaatgagtttaataactagttaattggtcgggcacggtggctcatgcctgtaatcctagcactttgggaggctgaggcgggcagatcacctgaggtcagcagttcgagaccagcctggccaacatggtgaaacccggtctctactaaaaatacaaaaattagctgggtgtggtggtgcatacgtgtaatcccagctacctgagaacgagactctgtctcaaaaaaaaacaaaaaaacaaaaaaccaaaaaactagttaatttaaaaaaaaaaagaattttttttaatttttttttttttttttaaattttaaagtgatggggtcccactgtgttccccaggccagtcttgaactcttgggcttcaggagtcctcccacttcagcctcctgagtagctgggattagaggcacatactaccttgcccagctaattttccaaattattgacagttgggtagaacctttcttctagtggttacataattgagtcattaacttactttacatatatagataataaagttatgaaattgttaccataggagatatggaataggcttaaagcatagtttcgctgggcagaattattgaacttggcgttttttttttgagacggagtctcgctctgtcgcccaggctggagtacagtggctcgatcttggctcactgcaacctccacctcccgggttcaagtgattctcctgcctcagcctcctgagtagctgggactacaggtacataccaccaagtccggctaatttttgtatttttagtagagatggggtttcaccgtgttggccgggatggtcttgatctcctgaccttgtgatccacctgccttgacctcccaaagtgctgggattataggcgtgagccaccgtgcctggccgaacttggctttttaagtagataggttccattggtttctatgtaatgctcagggatgaagatggctaagaagtgtgacaggtttatggagggtgtgaagactactgtagaacagactgttgtaaatgacttctctaacattaggttagttgtttctttttttgttttgttttaacttgctttgccatacttatgtttaaatatattataaaggaggcccatgtattttaactgccacagtaaatggcattcttcctttatattagtccttattataatttcaggatcccttggctggtataattccacgtacccttcatcaaatttttgagaaacttactgataatggtactgaattttcagtcaaagtgtctctgttggagatctataatgaagagctttttgatcttcttaatccatcatctgatgtttctgagagactacagatgtttgatgatccccgtaacaaggtaattcagtctttgagaatgaaatgtctctgaattttaatgtgtgaggctttgagaagtcagagagagagagagagagagagagagagagagagagagtgtgtgtgtgtgtgtgtgtgtgtgtgtgtgtgtgtgtgttttaaccaatctaatggatgttcttttggtattttggtcagagaggagtgataattaaaggtttagaagaaattacagtacacaacaaggatgaagtctatcaaattttagaaaagggggcagcaaaaaggacaactgcagctactctgatgaatgcatactctaggtaagaaagccatagtctcttccctagccccattttcttttaagaagaattaggaacttggagaaagtcaaattggggtgggtcagggtatgtgggtcacgtacctagagtttgtgttataaggaggggtcattggtaattggcttgagatttatatggaaggaaccaatattggaagaatgttgaaaggagaacaaagataagttgaaccatagctgaagtattaaacttttttttcttttttgagacgaattttcgctcttgttacccaggctggagtgcagtggcgcgatcttgactcactgcaacctctgcccaccgggttgaagcaattctcctgcctcagcctcttgagtagctgggattacaggtgtctgccactacgcccagctaatttttgtatttttggtagagatgtggtttcaccatgttggccaggctggtctcgaactcctgacctcaggtgaaccacctgccttggcctcccaaagtgctgagattacacgtgtgagccacggcgcccggcctaaacttttttaaagtagaagaatccttttattctagtaacatgatatatggaagcccaggataaaatgtggctgctatagttgattttggaatgggacgctctgaggcttacctccttagccttatgaaggggtccctgaggcacttttgtggagccccctactgatattagaatatagtttgaaaacccttgcattgaataaggattagaagttaggtcttttaaaatggctttattttagtgtgggagacagatggtcactaacactggctttcatggggtgaaagggatgatttttttcgctctaaatatcttttaccgaaatataaaattcctttttaaaaaattgtttattttcctctcttaccactctattcattgagatataaaatccctgtcataaatttacgtaagttagaaactccttttttcttgtaaagacccgtacaggacaaattccaaattctacagatatagtttactaaaacagaagtggtttttttgtgtgtgtgtgtggtctttaaacctcagaatgtaatagaaaaagcaatggattgcaattagatatttgcgtgtagtctcagtttcgcggttaattcagtatgtgactttttgtaaataagtgaatttatctgcttatcagtttctctgagctacaaaattattgttaggattagaagtcttatttcttttctggcttgtagttgaaaatttctataaaatgccataacaattacagttgcaactctaaaaaagtttgcatttaaagaaagaagaaaaatataacataaaagtgattaagatcatggaattttggatgatttcaaaattttaattaaattttcacttaatggctttccaataaaatggaaattttattctgtggttgattataacttaatttcatgtagaattttgagaactgaactaaagactaggtaaaatttctttaggtacatttcactaaagtataaaatttctatttttccttttttcttgtatgtagacttgtataaaggtcactttttatgaaggtatgtgacaaagaggagaagctaattaattcagttttcccaaattagagctaacttcaatgcttatttgtattaattgcctaatctggattaggaatgggtagataatggtagaaaaacatgagatgaatagtattattattattattattatttttgagacagagcctctctctgtcccccaggctggagtgaagtgatgcgatctcggctcactgcaagctctgcctcccgggttcacgccattctcctgcctcagcctcctgagtagctgggactacaggtgcccaccaccacgcctggctaattttttgtatttttagtagagacggggtttcactgtgttagccaggttggtctcgatctcctgacctcgtgatccgtccacctcggcttcccaaagtgattacaggcgtgaggcaccatgcccggtggagatgaatattataattcagatctatagtttacatttatgtttttccttaggtcttcctccttttctgtaattttaaataatttaaataattttataaaaatgatacttggctgggcgcgatggctgacgcttgtaatcccagcactttcggaggccaaggtgggtggatcacttgaggtccggagttcaagaccagcctggccaacgtggtgaaaccccgtctctactaaaaatacaaaaattagcttggtgtggtggcgtgtgcctgtaatcccagatactcggtaggctgaggcaggagaactgcttgaacccaggaggcagaagtttcagtgagctgagatcatgccattgcactctagcctgggcaataagtctcaaataaataaataattaaaaaagatacttaattttttttttaagtaacatgaaagtacaaagaagaaaattgaaacttaccagattctctgtcaattgtcagtgatattaacaaacataataatgttcaccaaatgccattggatacagaaagaatgtctttggtcatctgtataattttttttccccctaagataaaaagcacagtatttgttttgttttttgtttttttgtttgcttgtttgtttttttgtgatttttttttttgagacagcgtctcactttgtcacccaggctggagtgcagtaactcaatcatggcttactgcagccttgacctcctgggctaaagtgatcctcccacctgagcctccagggtagctggaactgtaggagcgtgccaccacgcccagctaatttttaaatttttttgtagagatgatggtcccactatgttgcccaggctggtttcgaactcctgagttaaagtgaccctcctaccttggcctcccaaagtgttgggattacaggcatgagctaccacccctggcctgaatatcagtatttagcataaggtagacttttgaacattttataatctagcagtgattatcttgtagtgttttagtaatcatgctgtttactatttctgctgttaggggataggagtcatctatttctgatgacagtctcaaagcagagaagtgtacttgtgcatgtacacaacagctgacatggatgggaaggtggaagagtaaactaatgccttacctggtaccatttgaatttatggtaatgacatatttcaaatggttcttatgaatagaagatgattacaagccatctcttcttgacataccaggcaactgtttcgaccccacccacatccagctttcagaggtgcctcaggattctaagtcttttagagagcttcttattgatgcctcttttgcaggcagtagatatgagaaaacaaaatcctaatcactgttctatctatctcctatcttccaaaatattcttgatatctcctgtctgatgttatctttctctactcatgtggatttagatcttctttcctgttttcagtatttcagaagcagcaaatgctattttacattataatgactgggcaacttgatattgttttctagtcgttcccactcagttttctctgttacaatacatatgaaagaaactacgattgatggagaagagcttgttaaaatcggaaagttgaacttggtaagcatccaccttaatactactgtttcactcttaaacaccttatagagcagcttgaaattttgtccttgagacaaaatttttgtggtcactgggtgattagctttgtagtgggagaagaaatttgttaattacagaaaaaattattttgctggcgatttaatacattatgtatcctgtgagaatgaaagtctttgaatccaaatccaatagactcactttttatttttatttttaaaattaaaggttgatcttgcaggaagtgaaaacattggccgttctggagctgttgataagagagctcgggaagctggaaatataaatcaatccctgttgactttgggaagggtcattactgcccttgtagaaagaacacctcatgttccttatcgagaatctaaactaactagaatcctccaggattctcttggagggcgtacaagaacatctataattgcaacaatttctcctgcatctctcaatcttgaggtaagccctttgaaaggaagctgcaagtgtagtagctgtaattcttatttggctattatatattttaaaagttcatttactaggatggacacagtgactcacacctgtaaacccagcactttggaagtccaaggtgggcggatcacttgagcttaggagtgcctgggcaacatgccgaaaccctgtctctaccaaaaatacaaaaaattagctgggtttggtggtgtacaactgtggtcccagctacttggggggctgaggtgggaggatcacttaagcctgggaggcagaagttgcattaagctgagatcatgcaactacactccagcctgggtggcagagggagaccccatctcaaaaaaaaaaaagtatgtgtataaaaaaaaagaaaagtatgtgtatacacacacacacacacacacacacacacacacacacacacacacatatagtagggaaaaaaagttcatttagtagcttcatttttttttttttgagacaaatcccactcttgtcccccagactggagtgcgatgacgcgatctcggctcactgcaacctccacctcccaggttcaagcgattctcctgcctcagcctcccaagtagctgggattacaggcacctgccaccacgcccacctaatttttgtatttttagtagagacgtggtttcaccttgttggccaggctggtctcaaacccctgacctcaggtgagccgcccgcctttgtctcccaaagttctaggattacacgcgtgtgccactactcagcctagcttcgttcattctatgctataatgtaaaagaatctggacattgcatatgaatatatacaggaggacactcctgaagaagttatctttttccttcctggcagagtttttaaccttaaaaagccagtttcttaatggctttttccacacagtcttcaaagaaaattgctgtggtcattagcagtgggtggtgtatggagatttaattgaggacttagaagcaggccaagtgaatgctcgctagtgtggtagaggctgcttagagaacactgaagatggcgttggatgtgtgagaacagagaggaaaaccaagaaaagtaacaaagatggtaaaatgtacgcttattttattgctatcatctgccttaagtggaaattttatttatttattaatttttttacttttagaggtagagtctcatactgttgccaaggccgcagtacagtagcatgatcatggctcactgcaacttaaattcctggactcaagtgattcccccaaccacagcctcctcctgagtagctagtactacaagtgtgagccaccaggcctggctaagttttgttttgttttgttttaaatagagacagaggtctcactatgttgcccaggctggtcttgaactcctgggctcaagggatcctcctacctcagcctcccaaaatgctgcgattataggcatgagccacctcacttgacctaaatggattttaaaaagcttttttaggccaggcacggtggcttacgcctgtaatcccagcactttgggaggctgaggtgagtggatcatctgagctcaggagttcaagaccagcctgagcaacatggtgaaaccccatctctactaaaaaatacaaaaaattagctgggcatggtggtgcgcgcctgtaatcccaactactcaggaggctgaggcgggagagttgcttgaacccaggaggtggagattgtagtgagccgagattgcgccattgcactcaagcctgggtgacagagtgagactctgtctcaaaaaaacaaaaaagcttttttaaggtgtccaactgccccttcattaaaaaaaaatctttgttgagatttaattcacataccataaaattcactgatttaaagtatattaatttaataattctagtatatttacagagttgtccaaccatcaccaaaatctaagttttgaacattttcataacctcagaaagaaagcctgtacccattgaaattacttttccatttgccccactcccatcgctactgctttttgcatctatatatttgcctattctgggtatttcatataaatggaattacgtaataggtagttttttgtgactggcttctttcacttagcataatgttttcaaggttcatctgtgttgtaccagcaatactttattcctttttacaggtgaatattattctatagtatggatatgggatttttttgtttttttttttttttgagatggagtctcgctctgttgcctaggctggagtgcaatggtgtggttttgactcactgcagtcttcgccacccgggttcaagtgattctcctgcctcagcctcctgagtagctgggattacaggcgccaccaccatgcctggctaatttttgtatttgtggtggagacagggtttcaccatgttggccaggctggtctcgaactcttgacctcatgattcacccgccccggccttccaaagtgctgggattacaggtgtgagccactgtgcccggctgatataggacattttgtttattcatcagttggtagattgattgagctttgtggtttttttgttttgttttgtttttttgttttttttttttgagacaaggtccctctctgttggctggagtgcagtggcacattcactgtaacctcaacctcctggccttaagtgatcctcccaccttagactcccaagtaggtgggactataggcacatactactatgcccagctaatatttatttatttattgtagaaacaggatctccctatgttgccaaggctggtctcgaattcctgggctcaagtgaccctcatgccttggcctccaaagtgctggaattacaaatgtgagccatcattgagtttaagaatagtctaaaggaaattatcctaagggtcgagactctgaaaattgaagagaagggaaaaaaggattgaacaacttcctttttaaaggttgggcatagtggtcttaatgactagattttaaaattagatataactataaaatattacttgtaagttattatataacatattttagataacagaactacattattctcacaatatcttcagtaattgacctttcctttccatgacaggaaactctgagtacattggaatatgctcatagagcaaagaacatattgaataagcctgaagtgaatcagaaactcaccaaaaaagctcttattaaggtaactgtgaatttttgtagagtaatgtaatcttgtttgacaaatgtgaaaataagaaactgaagtgggagataatagttaaacaagatttgttaaattgcccatggaaggctttttatatagtgatttaaactaaatgtcttacatgttaacatatttttttctaatgctagtatgttgactttaccaactttatcaactgagttggtactcttagcaaaattttcatttatttacatttacaaaatttatttatttgcatttttgaggtataatttacatgccataacatccacctaatgtaagcatacaattcaatgatttatagtgcatttacagagttgtggagtataaccacgatctagttttagaaaatttgttatcactatccagtttccctttgctcctttacaatcatgtggccactgacctgctttctgtctacagatttgccttttctggacgtttcctataaatggaatcatgtaatatttggtcttttgcatctagtttcttttgcctagcataaccatttggggttccacttataacatgtatcagtagtttatttctttttattgctgaatagtattcaattatatgctgataatatgacatttggatcatttccactaatgccattgtgaacatttctgtacatgtctttgtgttgatgtgttttcatttcttttgggtagatatctagggatttaatttctgggttgtatagtaagtttatgctctaagaaacttttccatgtagctgtaccactttgtatttcctacagcagtttatgaggtctgcaatttctccacctcctctttaacacttgttatggtcggtctttttaattttaaccattctaaggagtataaaatggtacttcagtacggtttttttgtttttgtttttgtttttttttttgagatgaagtctcgctctttcacccaggctggagtgcagtggcacgatcttgactcagtgcaacctccgcctcccaggttcaagtgattcttcgacctcagtctcccgagtagctgggactacaggtgtgcaccaccacgtctagctaatttttgtacttttagtagagatggggtttcaccatgttggccaggctggtcttgaactcctgacctcgtaatctgcccgcctcagcctcccaaaatgctgggatcacaggcgtgagccaatacgcctggccccaatatggttttaattagcatttccctaatgactaatgatgttgaacatcttttcttgtgcttattatctatttgtttatcttttttggtgaaatgtctattcaaatgctttgcccaattttaattggtttgtcttattaagttgtaaggagttcatgtagtctagatacaagcccttaatgagatatgatttgcaaatatttcctcccagtctggctttactttttcctttccttgatgttttttttttttttaaataaagtttttagtattgagatgattatagattcacatgcagttataagaaataatacagagaaaacaggccaggcacggtggctcatgcctgtaatcccagcactttgggaggccgaggtaggcggattgctttagatcaggagttcgagaccagcctggctaacatagtgaaaccctcatctctactaaaaatacaaaaattagctgagcgtagtggcacgtgcctgtaatcccagttactcaggaggctgagacaggagaattgcttgaactcgggagacaggttgcagtgagctgagatcgagccactgtactacagcctgggagacagagtgaggctctgtctcaaaaaaaaaaaaaagaaaaaaagtaataatacagagaaatcctttgtacattttgttgaactatagaatattaccacggggatattgatattaataacaatccactaatctttcccaattttccttacatgtgtatgtgtatttaattctagacagttttgtcacatgtataggttcatgtatttaccaccacaatcaagatactgaacagttccatcaccacgaggacccttcatattgctcttttgtaaccacttttcttcccaccatatccttcctttcctggtacccagtaacctgtcctctatcatttcaagactgttattgattggaatcatacattatgtaaacgtttgagattgccttatttatttatttatttatttattttgagatggagtctcactctgttgcccaggctggagtgcagtggtgcgatctcagctcacagcaacctccgcctcccgggttcaagcgattctccttcctcactctcccaagtagctgggattacaggtgtttgccaccatgtccagataattttttgtatttttagtagagacggggtttcaccatgttcgccaggctgggtctcaaactcttgaccttgtgatccacccaccttggcctcccaaagtgctgggattacaggcttgagccactgcacccagcagatctttcttttttagtactaagtagtagtccatggtgagtatgtaccatacatacagtttttgtaaccattcacttattgaataacatatgagctaatttcagtttttctgctattacaaacaaaactgctattgacattcatttataggtatttatgtaaacataaatttttatttctctgggataattgcccaagagtgcaattgctgggttgtataataattgaatgtttattattttagggaactgcctgtttttcaaattggctgtatcattttacagtgtatgagtgatctgatttcttcacatcctcaccagcatttggtggtgtaacttttttattttagtcattctgataggtgtggtaggtgatagatatctcattgtggtttttaacttgaatttttctaaaggctaatgatgttgagtgtctttttaatgtgcttatttgatgtttatatatttatgtatatatagcatatacatatattgcatatttatatataacatatacatgtatatatatatttatttcccattataatttatttggggaaatatctgtatatttgtcctgtagagttttaccatagtatcttttgacgtgttcctctgttctttgtattttctttgtaaatcggtagctgaatcttgaggcttgattaaattcaagttttgtcttatttatttttggcaaaactaattcataagcagtagtgtcttcttccatttagaagtatgtaatgtctggttctttgtcttttttttttttttttttttgagacggagtctcgctctgttgcccaggctagagtgcagtggtgccatctcggctcactgcaagcttcacctcctgggttcacaccattctcctgccttagcctcctgagtagctgggactacaggcgcctgtcaccacgcccggctaattttttgtatttttagtagagacagggtttcaccatgttagccaggatagtcttgatctcctgaccttgtgatccgcccgcctcggcctcccaaagtgctgggattacaggcgtgagccaccgcgtccggccagaggtatagttcttataggaaaggcaggacacatgcttgattaatttcctttatttgccaattttgagaataatgagttggtttcctaggtttcttagtgtcattataaactcctagatttaaactatttgtgttaacccattgtagttgttctcctcaccgatgctcagattggctcatcttaggccaggggtatgttagtctgttttcatgctgctgataaagacatacccgagactgggcaatttacaaaagaaagaggtttattggacttatagttccacatgtctggggaggcctcataatcatggcggaaggcaaggacgagcaagtcacatcttacgtgggtggcagcaggcaaagagagagagcttgtgtggagaaactcctgtttgtaaaaccatcagatctcgtgagacccattccctgtaatgagaacagcatggaaaagatccgcccctacgattcagtcatctcccaccaggtccctcccgcaacgcgtgggaattatgggagctacaagatgagatttaggtggggacacagagccaaaccatattaaggggttacatcttcaagtggcttactgagtccttttgattaacctagtaggctttgcttagcttatttccttgtcttatttgacaagatgttccgtattcatcttgaatattttctgcctcagtcctggaatcagatgcttttataaggaatcctggttcattttagtgtgaattactcctaccaacctgggtactggaggttgtggtttttcttgggaagtccatatttctagaatgagtgtatttaaaaaggagctttgaaagactttatttctaaacaaattaatattgattaaaaagtatggttataactttttatcatacttctttaagttttaaaagacataaaaaggctaactttacattttatttgttgcatgtccttcccaaactgaatgaaaaaagtactaaactgacacctacaacattcctcttgtgtaggagtatacggaggagatagaacgtttaaaacgagatcttgctgcagcccgtgagaaaaatggagtgtatatttctgaagaaaattttaggtaagcccttggctatggagttaatttccaagaataagcatttctgataacaggctatttgaagtaaaacttatgtagcagtaagtaaaatctttatatccagtgccgataaatacttcattttgtgtgtgtgtgtgttttcttttgagacaaggtctcgcactgtcacccagactggagcacagtggcacaatcttggctcactacgtcctcagtctcctgggctcaagcgatcctcctgcctcagcctcccaagtagctgggattataggcatgagccaccacaccctgctaatttttgcatttttttgtagagacagggtttcaccatgctgcctaggcttctattttgttttgacattaacaagtagctatcaaacactttttaaaaatcttttactaacttttaatttttaaatcattaattcatgtgaagtttcaagaagagtacaagagaggtttcatgtattcttcacccagtcttcctcagtggttatctcttaaataattatagtacaaggctggatgtggtggctcacacctgtgaatcccagcactttgggaggccaaggcaggcagatcacgtgaggttgggagtttgagattagtctgaccaacatggagaaaccccatcactactaaaaacacaaaattaccctgtgtggtggtacatgcccgtaatcatagctactccagaggctgaggcaggagaattgcttgaagctgggaggcggaggttgtggtgagccaagatcgcgccattgcactccagcctgggcaacaagagtgaaactctgtctcaaaaataagtaaataaaataatagataaataaaaaataggcgcgataaataaaaaataggctgggcgccgtggctcacgcctgtaatcccagcactttgggaggctgaggcaggcagatcacctgaggtcaggagttcgagaccagcctggccaacatggtgaaaccccgtctctactaaaaatactaaaattagccaggcatggtggcaggtgcttgtaatcccagctactcgggaggctgaggcaggagaatcacttgaacctgggaggcagaggttgcagtgagctgagatagcagcattgcactccagcctggggaacaagagcgagacttcatctcaaaaaagaaaaaggaaaaaataataataaaataaataaaaaataattatagtacaatatcaaagctgggaagttgaccttgatacaatatgtgtattagtttgttcttatactactatagagaaccacctgagactgggtaatttataaagaaaagaggtttaattggctcacagttccataggctgtacaggaggcatggctggggaggcttcaggaaacttacaatcctggtagaagagctaaggagaagcaagcacatattcacatggcggcaggagagagaaagtgaagaggaaagcactgcacacttttaaacaaccagatcttgtgagaactcattcactatcatgagaacagcaagggggaagtccatctttatcactcggttatctcccatcaggtccctcctccaacatgtggggattataattcaacatgagatttcagtggggacagagaaccagaccatatcaagatgtgtatatagtagttctatgccattttgtcacttgtatagatttgtgtaaccaccactgcaatcaagatacagaactatcctatcatcacaaggatctttcttgctaattcactgtagtcacactcacctcatcttttccatgattcctaacccctggcaaccactaatctgttcactttttaaagccctggagtaatttgttcaaaggaaagcttttattgaggcccattgtataaaacaacaataataacagagaaaacaaggggaagaaggcaagtgggatgctaaggactataacttgaaaattcctgattgtgtttatccttgaagatattaggaagcaagactttcacagagcattttttaaaagttaatagtgataaaagatattagacctaataataaccagaagcattttagtataatcttttactgaacttttttgtagatgttaacactctaatagtatataaatcatttaataaacttagttttttctgtgttacttccaactgtcataatgtattccatgaatgtgtaagatgccctagaatcagaacaatgtaagattgtgggttagtgaacagtttaccatcactaatggaggtgttctttttttgatgctttagaagtaaaaaataattggtgaggcactcaatcctggcctgtagtctttagaaatgatattgattattggaggctttcatctttctgattttatttttgaacttaagaagtaactttggttttcatttgtttagtcccatgattgaaaatatggtgtttgctctctttttttttaacttttattttagtttcaggagtacatgtgcagatttgttctatagatatattgcatgtaacaggagttggtgtacatattattttgtcacccagataataaccatagaacccgatggatagcttttcaatccttgctctcctcttaccctccaccctcaaagaggcccaggtgactattgttcccttcctcatgtccatgtctgctcagggtttagctcctacttataagtgagaacgtttggtgtttggttttctgttcctatgttagtttgtttaggacaatggcatccagctccatccatgttgctgcaaagaacatgatctcattctttttttttttttttttttttcgagacagtcttgctctgtcacccaggctggagtatagtggtgtgatctcggctcactgcaacctctgcctcccaggttcaagtgattctcctaccccagctgcccgagtagctgggattacaagcacctgccaccatgcccagcaaatttttttttttttaagtagagatggggtttcaccatgcaccatgttggccaggctggtcttgaattcctggcctcaagtgatcaactcaccttggtatcctggcgtactgggattacaggcatgtgccactgcacccagccatcttgctcttttttatgcctgtgtagtattccatggtgtatatgtaccacattttctttatccagtctgctgtggatggatagctaggttgattccacgtctttgctgctgtgaatagtgctatgatgaacatatgtgtgcatgtgtctttatggtagaacaatttatattcctttgggtatatacccagtaatgggattgctggctcaaatagtatttctgtgtgtgtgtggtttttttttttttttgagatggagtcttgctctgttgtccagggtggactgcagtggcacaatctcggctcactgcaaactctgccccccaggttcaagcaagtctcctacctccgcctcccaagtatctgggattataggcacccaccaccgcacctggctaatttttgtatttttagtagagatggggtttcaccatgttggccaggctggtctcgaactcctgacctcaagtgatctgcccacctcggcctcccaaagtgctggattacaggtgtgagccaccatgccctgccggtatttctgttttaagttctttgagaagtcgccaaactactttccataatggctgaactaattttcattagtagcatataagcgttcccttttctccacaactttatcaccatgtgttattttttgactttttaataatagccattctgactggtgagatggtttctcattgtggttttgatttgcatttctctaacaattaatggtgttaaacatagtttcatatgcttcttagccacatatatgtcttcttttgaaaaatgtccacatcatttgcccacttttttttttttttttgagacacagtttcactgttgcccaggctggagtgcagtgtggcacgatctcagctcacttcaacctccacctcctgggttcaagcgattctcctgcctcagcctccgaagtagctgggattacaggtgcctgccaccatgcccggctaatttttgtatttttagtagagatgggatttcaccatgttggccaggctggtcttgaattcctgacctcaagtgatctgcccacctccgcctcccaaactgctgggattacaggtgttagctaccgtgccccgctgggtgtatatgattttatacttagaaaaccccatagtctctgtccataagctcctagatctgatcaacaatttaagcagagtttctggatacacaatcattgtactaaaatcagtagcattcctatataccaataatgtccaagctgagtgccaaacaagaatgcaattccattcacaatagccacaaaaacagtaaaatacctaggaatacaactaaccagagaggtgaaggatctctacggtaagaattataaaacactgctgaaagaaatcagagttgacactaacaaatggaaaaactttccatgctcatggataagaagaatcaatattgttaaaatggccataccacccaaagctatttacagattaaatgctgttcctctcaaactaccaatgacattcttcacagaaaaaactattgtaaaattcatgtggaactggaaaagagcccaaatagccaaagcagtcctaagcaaaaagaacaaagctggaggcatcgcattacctgacttcaaactatactacagggctacagtaaccaaaacatcatggtactggtacaaaaacagacacagaccaatggaaccgaatagagagcccagaaataaagccacacacctacagccatctgatcttcgacagaacatgcaatggggataaaactgcctgttcaataaatggtgctgggataactgcctatccatgtgcagaatattgaaactggaccccttccttaacgcccatatacagaaatcaactcaagatggattaaaaacttaaatgtaaaacctaaaactaaaaacccttgtaaaaaacctaggtgtttgttctctaatacacatgaggcataatctgagatagttttgtctgaaaacgcttttggaattagtacagtgtcagtcagagaagaatcacaaaaactacagccaacatttaaaacaggataatgctttatttaagccaagcttaatagacattttaaaaccatatcaaaatcatctcatccatacagtaacaatgttgtattaccccttggcattcactataaaaaagcatttcaaataatcccgttttacataaaagatctatttctatttattttattttatttttatttttatttttgagacagagtctcactctgtcacccaggctggagtgcagtggcgccatcttggctcactgcaagctccgcctcctgggttcacgccattctctcgcctcagcctcctgagtagctgggactacaggtgcccgccaccacgccctgctaattttgtttttgtattttagtagagacagggtttcaccatgttagccaggatggtcttgatctgctgacttcgtgatcttcccgcctcggcctcccaaagtgctaggattacaggcgtgagccaccgcgcctggctgtagaagatccatttttaataaaaagctaatatatttcatcaaaagactattagaattaactcttctcttacagctcttttctagcttttcctttagtcaacaatatctctagctaatacgttaagggaatttgtattcacggaagaatctttgtcatttaagcataatgtgaaatagaaaattgttggttgttatcaaagaattagatgagcaaatacaggcattcatttctgaaactgactaatactcaagaaatcagagacccattaaagtgggtttggaagacctgtgagctttgcgcttgagaaaagcattctctattttactttttatgacttcttttgactttgacttcatcttctgatatttttgttgaatttagaaatttttagtttctaaaaactcttttctgccatccctgtctctccttttgaaaaatatagcatccttttattttatagatctattccttatctcagaaacattattaatgttattaaagttttcttttatgtttttctttcctttgggatcttttttttccctgttgtgatatctgtcatttgtatttattttcttcaaatgtctagtgatttttggctggcaattaagatggattagaagctttgtacatgggtgaggattatggacctgtaagttcactatagatgaaaaagtggtgatctcagtcttaagtctgggcttccatcagatatcattctttgttggattttttttcttttgttctagccctcagtcttttctgagaagatttgcccagtttgcttggagatttttctagctgctgctattttttgattagagtgggtatagggggctgaggattccatcattttgtatgtagatttacacttaaatgctcatttctagtccctaaaccttctacagtccatgatgtctagtgaaagtgaacctggaaattctgctgcaattcctatagactagtggctgtcaatggaagtggtgttgggggactggtggtggtgggtggttttgtcccccagaggacatttggcagagtccagtgacattttttatcatcatgacttggatggtactgaacatcctaaaatgtacaggacatccccacaatgaagaattatttgatccactagtgctgaggctgagaaactctgctctagagagtaatcctttgttctcatgagggttatgcggtggggtgagagtggtgtttgtgcgtgttgcagcagcagggggtgtaattgctctgtatacatactttaagtctcagtttttaacccctaatcttaccccttccttctaagatacctgatgccttcaagtcccacatttttccagcattctgtggggcatatttatattctgtatccctgattatagacacttaggttgcattccctcctctctctactttgagttatagtccgtcctctgttagctttctagcttctcaaatctggaacacacatgcttttcccctcataggtagggattcttagtttcagaattgagggcaagggaaaaatatttcatttataaaacaaagacaaggaatataatttgttctttgtaatttgtatttattgcttattgacacaggtatcaagtgacacttgggtatcaagtgatggtgataaatgttggaaatgagtttgtgtagctgtcacaattgtgttagaatacattttataggagttagaaaaaaatattaactgttaaactcatattaaactttattttagagtcatgagtggaaaattaactgttcaagaagagcagattgtagaattgattgaaaaaattggtgctgttgaggaggagctgaatagggtaagcacttaaaatgatatttactgttatgtgaaaagcaaatattgaaagaaaattttagaatgaaagatctaatattttttccttcaagattttttttttttagacggagtctcgctctgtcacccaggctggagtgcaatagcgtgatctcggctcactgtaacctctgcctcccagggtcaagcgattctcctgcctcagcctcccgagtagctgggattacaggtgtgcaccaccatgcctggctaattttttttgtatttttagtagagacagggtttcaccatgctggccaggctggtcttgaactcctgacctcatgatctgcccatctcagcctcccaaaatgctgggatgacaggcgtgagccactgcacccagctccttcagatttttttggaaaaaaaaaaaagattttattttgctgacccttatactgaaagtaagttatatcatgattttttactatcattaatcacatcaaaaaagctgacagcttatattaataaaacattacaagaaattaactgaattgtttgattttgttattgaaactacaaaatagtgaatgctgaagcagttttgttaacatgtttatcagatgaaggaatacagatattgggagagactggatgttaaataaaagtaatataactagggtaggcaagaggcctgacctttcagggccaccctcatattaatacctttatttatttatttttaattattttttagagacagggtcttgcttgatgcccaggctacagtgcagtggtgtaatcatatcttactgcagcctcaaacttctggtctcaagcaactctcctgcctcagcctcctgagtagctggacttcaggcatgcactaccatgcccggctaattattttatttttttgtagagatggagtcagtctcgctatgttgcccaggctggtctcaaactatggggctcaagtgatctcctgccttggcctcccagagtgctggggttacaggtgtgaaccaccttgccaggccacattaacactgttatattcaaatccattgacaatgttgaaggaaactgaagaattaatagtactacaccagacctattatttaatctcaaagtgttgagtaagattacagaaagaaacaggatgacatatttgtgttaacctaccgggtaacttcttacaacttttgcatggaaataatttgtttcatttttctaatcttatgaactagctagatatcctaccagccagctcagcgttttttaaattcttatatttaggttacagagttgtttatggataataaaaatgaacttgaccagtgtaaatctgacctgcaaaataaaacacaagaacttgaaaccactcaaaaacatttgcaagaaactaaattacaacttgttaaagaagaatatatcacatcagctttggaaagtactgaggagaaacttcatgatgctgccagcaaggtttgtcccttgtgttgatttgtactcatattaagtagagaatgggtagaaaaaattttctgtgcttaagcattaaatattctgtttattcaccccaaatggtatttctgtccatttaaaaaacattattttactatttcatccatgtttttctcactggagatgtcgacttatgaaaaaactactcctgctcctggagttttgaaaatagaacataacttagctgggagtggtggctcacgcctataatcccagcattttgggaggccaaggtgggtggatgacctgaggtcaggtgttcgagaccagcctgaccaacatggagaaacctgtctctactaaaaatacaaaattagccgggcgtggtggcgcatgcctgtaatcccagctactcgggaaggctgaggtggaagaatcacttgaacccgggaggcagaggttgcggtgagccgaaatcacaccattgcactccagcctgggcaacaagagcgaaactccgtctcaaaaaaaaaaaaaaaaaagaaaatagaacataactttataatatattttgtagacatttagaatagtgatgctgtgatgctttttctttgtggggatgattgaacctaattagtcattaagaatttagtatgttctgtccaggcatggtggctcacgcctgtaatcccagcactttgggaggccgaggtgggtggattgcttgaggttaggagttcgagaccagcctgaccaacatggtaaaaccccatctctactaaaaaaaaaaaaatacaaaaattagccaggcgtggtggcacatgcctataatcccatctactcaggaggctgaggcaagagaatcacttgaacccaggaggcagaggttgcagtgaaccgagatcatgccactgcactccagcctgggtaacagagcaagactctgtttcagaaaaaaaaaaaaaaagaatttagtatgttctgatgatgaaagatgttgaaagtatttaattttttttttttttttttgagacggagtctcgctctgtcgcccaggccggactgcggactgcagtggcgcaatctcggctcactgcaagctccgcttcccgggttcacgccattctcctgcctcagcctcccgagtagctgggactacaggcgcccgccaccgcgcccggctaattttttgtatttttagtagagacggggtttcaccttgttagccaggatggtctcgatctcctgacctcatgatccacccacctcggcctcccaaagtgctgggattacaggcgtgagccaccgcgcccggcctttaattttttattagttgtactttttttttttgagacagactcttgctttgtagcccaggctggagtgcagtggcatcatctcagttcactgtaacctttgcctcccgggttcaagcgattctcccgcctcagcctcccaagtagctgggattacaagcgcctgccaccacacccagctaattttgtatttttagtagagactgggtttcaccatgttggccaggctggtctcaaactcctgacctcaggtgatccacctgcctaggcctcccagagcgttgggattacaggtgtaagccaccacgtccggccattaggtgtacttctgaggaaatagtagaacatagaaggaaaaaaatttctgaggaagcataattattgcaataactgaaaaaatcagttttccttgcttgtgtagatggctacaggaagggaaataaacattactgggcatctggataaattagcatgagttaaagcatttcttctgatacaatgtctaaaattgactttttttttttgagacagagtctctctctgtcaccccggctggagtggcagtggcacaatctctggctcactgcaacctccacctcccaggttcaagcaattctcctgcctcagcctcttgagtagctggaactacaagtatgtaccaccacacccagctaatttttgtatttttagtagagacggggtttcaccatgttggccaggctggaaaatttactagttcttatcaagataaatccttgtgtagatactttcatcagattcctttcaccgtatccattttgtctaacacttatttttaaaaatatagctgcttaacacagttgaagaaactacaaaagatgtatctggtctccattccaaactggatcgtaagaaggcagttgaccaacacaatgcagaagctcaggatatttttggcaaaaacctgaatagtctgtttaataatatggaagaattaattaaggatggcagctcaaagcaaaaggccatgctagaagtacataagaccttatttggtaagttcaggctgttctgttctagtcttgatgtgttaagtgtaatgttgatttcaaaactgataattttgtgaaacatagatgacggtgtcaccaatactctctaccatgcacaaactatttgttcagggtgaagattaatgcttttattgtctttgaattaaaacaaatcttttttccctccccaccctcccttctgttttctataaaatgttacatttattaagtaactaagtatataaacgttagaagtagaagtcctctttttccctgactccggctcctgaccctgggtcattgaccataggtgttattgttaaatttcttgggcctttttctggaaattttttgtgcataaacattctgcaactttttttggggggggcatatatatcttgatggtttgctatattgtcagaatatgtttgtgtctcattgtttttaactattatctccctttagaaaaaagtatgtttatttagtgtgaaatactatcctcattatggaaaatttggacattcagaaatataaaaatttaaaaaatcatctagactctagtctcactaagccaagcactatactttttggtattgatttccagttttttttttcttctgtaaacttaccataattctgtatattatttttagttagagattaattgtagaatattctaattctttgtgtactatgaattatagttatgggtctgatacacttacaaatatgttaagggcttacagagcactatagaaaattgtaatgtatatttaaatatttccttgctttgtagtgagccagttcttttaagctcgttattacaaattctacaacaagggtatacttttgtcaacttctttgaaatggtttgaacggtatttaatatatttatgtcaaagtttacatctttctgtttttgtttgttataggtaatctgctgtcttccagtgtctctgcattagataccattactacagtagcacttggatctctcacatctattccagaaaatgtgtctactcatgtttctcagatttttaatatgatactaaaagaacaatcattagcagcagaaagtaaaactgtactacaggaattgattgttagtacatcctttaaaatatttttgaagggttgcatttgataagtatttgataaaatattttgaagggttacatttgataagtctttataaacaatgttaactgctattctttcttcctgagctttactagacacagtcatagacacgtcactgtgagagactacatatatatatattttgttttgttttgttttgtttgtttgttttgagatggagtctcgctctgtcgtccaggagtgcagtggcgtgatctcggctcactgcaagctctacctcccgggttcatgccattctcctgccttagcctcccgagtagctgggactacaggcgcccaccaccacacccggctaattttttgtatttttagtagagatggggtttcaccgtgttagccaggatggtcttgatctcctgaccttgtgatccacccgcctcggcctcccaaagtgctgggattacaggcatgagccaccgtgcccagccagcctctccttttctttatttgtatttatttatttttttcagcctctccttttctcggctcactgcaacctctgcctcctgggttcaagcagttctcttgcctcagcctcccgggtagatggaattataggcatgtgccaccacgcctggctaattttcgtatttttttttagtagagatggtgttttaccatgttggtcaggctggtctcaagctcctaacctcaagcaatccacccacctcggcctcccaaagcgctgggattacaggcgtgagccaccgtgcccggccgagagtacgtttatatttttaaagacagatctctccactgtttattctctcccagaaagattattttcaaatgtatggaactaacttttgaaacctttttcactcatgtcttgtaacattaggagtagcagttattagtgaggcttctaatgactaaagggcaagtttagcaccacatgatatcaagggacttgttagttggcccagaaattggcaagtcactctttccccaggggtcctggacccaaccagaaggggatattgggtagctgattttaaaactacagtaatatatgatagtaataatggtgcaagaaaaatatcttagaattctggggacacatatcacttcttagggttagatctgtgtggccccttctgggccataactataaatcttttctccagagttctatggaagtcactcatctaattgcacttaatattacctccttcatacttgatttatatatagtctttattttataattgtatggttggtctaggaagttcttagccatataatttatttgttttctttgtgcagagtctttgcctccctttttcagcttaacaatatttattaaacattttccaagtaaatactacaaatgttagctgaccctctgcctcaattcagtgcttagatgacattatttgataggttttctcaatcacccaaatttgacaaaattaaaagatatcctgtcagtactaacttttcaaatattgattcattcattaaatggtggtctgtatatatataggcatacttcagagatattgcaggtttgcttccagaccactgcaataaagtgaatattacaataaagcaagtcatgaattttttgctttcccggtgcatataaaggttatgttgaccaggcgcagtggctcacacctgtaattccagcacacgcctggtgggacaatcagaacacaacgtttatcagttacatttgctgtcttataggggtacagtttatggtaccccaagacaattacaatagtaacatcaaagatcattgatcacagtgtataatgaaaaagttagaaatactgtagtagttaccaacatgtgatgcagagacagaaagtgagcacatgatatttgaaaaaagtcactgatagacgtgctcaaggtagggttgccacaaaccttcaatttgtaaaaatttggtatctgtgacacatagtaaggtgaagcacaataaaataagctatgcctgaattgatacatttctacttaccaagttacaatttttgcttgaattaaaagaaaagaggcatgttgctctcacaaaattagttgaaattggtatgctagctcttctttccaaaagaatgtcagtagacctataagtatttactaatgtatttctgttatacttcctcagccctatcctaccaaaaggagattagatcaggattttttttctttttataaatatttccaatctatactacattcttaatttccctatttcttgacaagaacaacatctttcacaagttcttctgatacaataggatgtaagtcatctcagatcttcaaagttaagtacttccagcccaagggctaatcttgatgactacttggtctcagcctttttgactggtaacctaaacttgtttgaaatttattttcttaaaatatacctgtaggtttttaaaaatttattttgtttggagtgctgaaatcttattaactgtcattttcctcttttgaattcttctgacttctatttcattaaactattaaatagttctggctgggtgcggtggctcatctcagcactttgggaggccaaggtgggtggatcacttgaggtcaggagttcgagaccagcctggccaacatggtgaaaccctgtctttactgaaatacaaacattagctaggcgtggtagcaggtgcctgtaatcccagctacttgggaggctgaggcaggtgaatcgcttgaacccaggaggcggaggttgcagtgagccaagatcacgccattgcactccagcctgggccacgagagtgaaactatatctcaaaaaaagaaaaaaagaaattctgtgttttcactgggcttgaaaaaagagaaattattatatttattgtaatataataaattattgtattattgtattgatttatctatgtagagtataaaaaatggagaatggggccgggcgcggtggctcacgcctgtaatctcagcactttgggaggccacggggggcggatcacctgaggtcaggagttccagaccagcctggccaacatggcgaaaccccatctctactaaaaatacaaaaattagctgggtgtggtggctcacacctataatcccagctactccggaggctgaggcaggagaatcacttgaacccaggaggcagaggttgcagtgagccaagatgttgccactgtactccaacctgggtgacagaatgagactccgtctcaaaaaaaaaaaaaaaaaaaaagaatggagaatggaaatgtaaattttaatgtgaatgtttagctaccaaagtatttaagatatcatttagaaaggtttacagaagtggaaatattctttttaaagacctatttgtttatttctgaaaccagaatgtactcaagactgatcttctaagttcactggaaatgattttatccccaactgtggtgtctatactgaaaatcaatagtcaactaaagcatattttcaagacttcattgacagtggccgataaggtaacaaatgctatgttcttaatatctcaaaattgatgtgttgtttaagaaggaaactcatttttgtttcttcaaagatagaagatcaaaaaaaggaactagatggctttctcagtatactgtgtaacaatctacatgaactacaagaaaataccatttgttccttggttgagtcacaaaagcaatgtggaaacctaactgaagacctgaagacaataaagcagacccattcccaggtatgttgtttagcggacttggggagtacagaaagagagttttaggatgatttgatatgacttgataattaatctatgttacacaatctgaatactgtaaaagctgaaacctgaaaataccatagccactgttgcttataacagtaattattgtagaacaattgagaatacttctcttaatatttgaagttttgctacatctagaaccccatgcagaaccacaatatgacaaaacagtccttttctcacatcaagatgaaagatgaatctggaaaaacatacctttagagaagaatggttataacatttaaagtgaaaatgtatctacattaaaacctgctaagttgtttctaggatggcatggatagttgtctttcataaaccaagtcctactttctcttatttctgtctcactgatagacatttaaaacatagtaaatcgatacaacttttaattcttattgattataaatgtaattcatgatttatcttccctgtaaactgttcctcattatatgaggctttaaaccaaaaccaagccttcaaaccataatctgtaaatatcagatatctgaaaaacagcttctggtattcttaagactttaataatgactgtctaaagttttattaaatgagcttattataatatgacagaactcttataatagttaacatttattgagcaattcactgtgtttattcctcccatcaatatagatataaattctattactagtcagatttttaatgaggaaactgagaccctgtgagcatctaatagtatgtagatcatcttgcagaaggtggtagtgatcatactacctgaaaagcatccatgtttgagtggctcttttgtgtgttttttggcaacttaaaactgcagcattttctcatacatctacatagggtatttcccttaaacccgttgagaactttttaggtgtatattctaaggctgatcccctttttataaatttgctgttttgaaatgcttaaaattgttagacagctctttaaaaaaacaatacaaaaaaatctgatctgaaaagtatcttagcatgaatggtttggctttcctggctttaaggaagcaagttcagtatgtgagctatttcttaggttttccagaacttgaaatgagcactactaaaataattatgtaaaactttgaacacatttacatatagataaatataatacctgcattagcattcaaattattaatctgataatacctttgagactagtaaaaatactgacagactttattcataatcagaatgttagatatgtattgtcaactgatgtgttattcagagatactggccaaccagcagactgaagagtgaataagaatgttggatgcattttcagctcttctttggtcattaggatggcttcttcattttgcaatgtagcatgttatatgcctataagagcttgttttcaaagatgtaaaatatgagcaaagataagactatttacattttgttaatatgatccaactaggttctgtaacattttttagctccagtaattgataatatttttggattgcttgacccgttagtatatcacattaattttcccttctagcagtgttatcagttaaaaagcaactatatatatctgtcaaagtgggtcttaaacataatgtgatatatgggttgtttgattagttttgaggtacactgaaagtaatttgttacttacagctaaaatagtaaagtttgctaattatttactttttaaaaaatcctggctggatgtgatggctcatgtctgtaatctcagcactttgagaggctgaggcagggtgatcacttgaggctaggagttcaagaccagcctggtcaacatagcgagatcacgtctctacaaaaaaaatttgtttaaattagccaggcatggtggctcatgcctgtgtagtcccaactacttggaggctgaggaaggaggatcccttgagcccaggaggttgaagctgcagtgagccttgattgtgccactgcactacagcttggacaacagagtgagaccctgtctctaaaaaaaaaaacaaatcctacattttaatatcacttccactgctttcctctgtagaagaaaggtaaagttaactttatctcttgtcaagaatttatataattctcacctatggacaatacttcttgttttgttatcagtcataaaaaatgttcaagtgtcataattttaagtctcttcacttcccacacctttcttacaggaactttgcaagttaatgaatctttggacagagagattctgtgctttggaggaaaagtgtgaaaatatacagaaaccacttagtagtgtccaggaaaatatacagcagtaagctatttttaaattctcttaaacttttctgtaagtctgaaattatttaagaagaaaaagctttaaatagtacaaataattcctctgtgtactttcaaatttctcttttgttaatattttattatgtatgtgtgtatgtatatatatacatgcatataaatgtcttttcattgcgtatttgtgctctcttttaagacattgaaaaacctggctgttacccacaatatattttcgaatttcctcaatcttagaaaacacactaagtaatttcacaatttctaacctatattactgatgaaaaatatactaactagagcagggtttggcaaactgtggctagcaggctggatgcctgttattgcaaataatttcattggacactgtttacatgttgtctttggctgcctttgcactgcagtggcaaagttgagtcattgcatccaggtcattgaacaatagcctaaaatatttgctatctggcttttcaagaaaaagtttgctgattcctgtattagggttttgttttttgtttttgtttttgtttttgcgacggagtcttgctctgtcacccaggctggagtgcagtggagtgatctcagctcactgcaagctccgccttccaggctcacgccattctcctgcctcagcctcccgagtagctgggactacagatgcccgccaccatgcttggctaattttttgtatttttagtagagaggggtttcaccatgttagccaggatggtctcgatctcctgacctcgtgatccgcccgcctcggcctcccaaagtgctgggattgcaggcgtgagccaccacgcccggctctgttttgttttttcagacaaaaacaaacagcctgctctgtagcccaggctgaagtacagtggcgcgagtgcagtggtgtgatcttggctcactgcaacctctgcctcctgagttcaagtgattctcctgcctcagcctcccgagtagctgggattacaggcacataccaccatgcctggctaattttttgtatttttagtagagatggggtttcgccacgttggccaggctgatcttgaactcctggtctcaactgatcctcctacctcggcctcccaaagtgctgggattgcaggtgtgagtcactgctcccagcctgtattagagtttaatgttgctttgtagcctcattgcttgccagttccgcatacttaacatacactacagtcagacctatgttttcttttaggaattttataactttatggtttaacatttatattcatgatccatttaaaaatttttataaaacataggagatttgtcaagtttcagttttttgcctattgagtattctatactcatgaggagaaagatactatatttaccctatttttccccatttaattctgaaattaaacttcctaaagtttcaagctttctttggtgggaagtagtctttaagggtgggtctgctggacagaaattgtttttctttgtctaagaatgtcttgatttccccttcattcctgaaaggtattttcactggctgtggaattcagggttgacaattatttttttccagcatttgaaatatttccattttcttctggcctctatgaaatgagaaatccactgccattcaagtaattgttcccttataggcagtctccctatagctgctttcaaaacttttttgtctttagaaacttgattatattttgtctacttatatttcgttgagtttattctatttgggttttgtttagcttcttgaatctgtaggcttatgcctttcaccaaaacttgggaaattttcatctattaattctttgaatatttttcagccctatactctttttcatctgcccctatgactttgatgacacaaatgttagatcttttattttggtccctcaggagatatgtagaatatatttcttatagatacatatattctctttgttgttcacattggggaaattctattgatctgtcttcatattcactgagtctccttctgtcatctctaacctactgttaaacccattcaatgaggtgttttttcagttattgcttttttatttttagttttataattttcatttgctttttttataccttgtttcttagctaggatttttttcttttccaggagtattttaatttctttttggagcattttttgatggctgctttaaaatccttgccagacaattccaacatctgagttttcttgttgttgccatctattgattgtcttttctcattcaacttgtgatttttgtggttcttgatatatgataagtgatttcctattgtaccttgaagattttgggtattatgttaggagattcaggatcctatttaagtattttttagctggcattcaccctgtttaggcttagcatacagatccaggctcacttttatgggctgtggttccactgacaatttagtttttagagcccttgcagtgttattctgataatgctttgtttgtgtgctacccacatgagaaaaatttgtattctgcttttgttgcatgaagtgttctgtatgtgtcactttgatcaagttgattgatagtgctattcaggtcatccacggccttactgagtttctgcctatttgttctatcagtgacttagagaggagtattgaaatctctaattgtagatttatctattttttttattagttctatcagtttttgcctcgtgtatctgaaactctgttgttgggtgcatatacatttaggattattatatctccttggagaattgacctctttatcattatgtaatatccacttttatttctgataagctcttgttctgaagtctgttttgtctgaaatgaatacaggttttctagctttcctttgattgctatttgtatgatgtatccttctccatctctttacttttggtctaagtctttatatttaaagtgggtttcttatagacagcatgtagttgggtcttgctttttcatcaaatttataatctatgatgttttatttttatttatttatttgagacagagtcttgctctgtggcccaggccggagtacagtggtgcaatcttggctcactgcaacctctgcctcccgggttcaagtgattctcctgcctcagcctcctgagtagctggggctacaggcacacaccaccatgcccagctaatttttaaatttttactagagatggggtttcaccatgttggccaggctggtttcgaactcctgacctcaagtgatttacctgccctggcctcccaaagtgctgggattataggtgtgaggcactgcacccagctgcctttcctcatttaaattgagcactttttatgtttttatctcttccattgacttatttatactttttaaatattccctttttagtagtatgtctaggatttaaagtatacattttaagataatttgaatttgtatacattttaagataatttgaatccattatcaaataatttgctgtttcatgtgtagtgaaaggacattataatagtatattcctgtttcctctttcccgtttgtcattattttcatatgttttacttaggtgtttatatgtgcaataaacacctaatacattgttacttgaattgctttatctattttcttttttaatgtatctactagatttttttttttttttttttgagagggagtcttggtctgtcacccaggctggagtgcagtggtgcaatcttggctcactgcaacctctgcctcccaggttcaagcaattctcctgcctcagcctcccaagtagctgggattacaggcacctaccaccatgcccggctaatttttgtatttttagtagagacgggggtttcaccatattggccaggctagtctcaaactcctgaccttgtgattgcccgcctcagaaatttttaattgcatatgtggcttctattatacttctgttgaacagtgctgttctggaactctagctatcatttatatatccctacctaacttctgtcatttgtttttcaaccctgtttttgatcctgttaagtatagcatgttccattgtgaactcttcctatatgctgaatcaaaaaagtatgtcctactttttattcctagtatctagactgatggatttctaggccattccatagccgtggaggaaatactagagtaggattgaagtaggaagggaagtatgatatactttcttaaggcccatgcaaatcatttttcctgctttcctgacatttattgtctacaccagagtttcccagtatggtctagggactttgtattcatcacccaggaatctaggtgatgtttatgtacacactgcacataactgcgtttggcatttattgtcatggcttatagtacttttaactcaatctcgtcttcccattaagttgtgagattttgttttgttttttttatttgagacagagtcttgctctgtcgcccaggctggagtacaatgacacaatctcagctcactgcaacctctgcctcctagggtcaaccaattctcctgcctcactctctcccaagtagctgagattacaggcacccaccaccacgcccggctaatttattgtatttttaatagagacagggcttcaccatattggccggactggtctctaactcctgacctcaggtgatccacctgcctcggcctcccaaagtgctgggattagaggtgtgagccactatgccttgcccttttttcagtcattgtgactttcacgtgtaggtttggtttttaacatctttgctgactcacttggtttacccacgtggtgtaccatctagtggtaatagagagtcacttcattccacaaggtttaaatcttgtaagataacttggaatgctattatagggcaacttaccgagatggaaattatcaatgaattttaaatgtatgtctaaccaacattaatattatatcaagtttatgttacattgttctatatgtataatttgtcacaccccaatataattttaattattagaaagctttatagctaatttaaacataacatttgtaatgttcatgatttgttttacatactaggcaagggaaactgcttaataacagaataaatgactgattgtccaatttagggactagacaagaggctgtagtagatgccctgaagtaacattgcctagtaagaggaataaaacaagtagacagattttgaaagcatcataactggaggagggttgtgaaaggtttcatgagcaaagatgatcctttcaaaggtcatttaatggcaatgctgtgaaaagacagtggccaaggcatccattctcaatgcagaagatttactaagatcacgggccctggagccagactgtccacgttcagatctgccacttaagagctgagtgatcttgggaagttatatatcctttgagtcttaattccccatttcaacagtgtcattctcttttcctataggaaatctaaggatatagtcaacaaaatgacttttcacagtcaaaaattttgtgctgattctgatggcttctcacaggaactcagaaattttaaccaagaaggtacaaaattggttgaagaatctgtgaaacactctgataaactcaatggcaacctggaaaaaatatctcaagagactgaacagagatgtgaatctctgaacacaagaacagtttatttttctgaacagtgggtatcttccttaaatgaaagggaacaggaacttcacaacttattggaggtaataactttgtaagtggaacttactttggggagaataataatcagaaagttaaatattcttggctaagaatagatttcaaaacaaatgatattttaagctataatgacttaaacttttaagtataatatttggtatgcttacagatgatctcgttttgtgctttgttatatgtcttctcaatcttggaattaatttaacatttgtacagtttctttcctgtatttatccttggtttctgacttagtagtttcttcaaagaagggcaccctgtcttttgatatgtaataccttccacttatatatgctttttttttttttttttttgagatggagtctcactctgttgcccaggctggagtgcaatggcacgatctcagctcactgcaacctccgcctcccaagttcaagcgattctcctgcctcagcctctcgagtagttgggattataggcacctgccaccacacccggctaatttttttgtatttttagtagagatggggtttcactatattggccaggctggtgtcaaactcctgacctcatgatccacccgcctcggcctcccaaagtgctgggattacaggcatgagccactgcgcccggcctatctttgctttttacttttctccaagtacattcaaacctattattattttaagtatttaggttattgttctggtaactaaaggatacttgataggtttatggatttgcttgaacttaacgcttgcatgagccctttgtaacttggttttttctttctttgcattaataggattttactaacattctcaggaagtaggtacaaagaattaaaatttttaatctatataagctgttttcactaaaaggaactagagtttgtatacaaatagctaatttcagatttgtgataggaaatgtataatatatgagcctagagatcttgtcataccagagagtaaggaagctgttaaagatttctgaggttgtcaaaaggtcttagtagccaacctccccatcttcaaaggtggcataatttgagcatcaaaaagaataatggccataatggattaaaacatatcaaatatattaaaacttacgaactcataaaaatttcataggtctcctttggatcatgctagggaagcaacacattgtcctgaaaatgggtaaagaagaagaaaaaatttagcatccatctgtctttcctaaaagaaccatatcttggtttagcagggtaatgaagaaaagtgtttcattagactctaagctaataaaatggagaagaaatgatagaattaatatatcaccagtatgcaactcttaataaaataacccctgtggatgttaatgatggcttaaaccatttgatcaaaagctgttggggaactttataattaataggctaaccatacctgaactcactgataaatcttaacatgagagacacagcaaagcattttgtgcttgcagtactacctatgaaatactcttgctaaaaaattaaacctgaattaaatcaagcctttaggtctaaccagtttgtagaaaataaagcatagaaatgcagttgaccaaatccagaatttgagatgttcaatggggtaaagacctcatgtcttcagcaacaagttttttttttcaagggaaaaaatatgagaaacaataacctgtatatcaaaagagacttaagactagaggtccttaagtcttagtttgcctgagacagtccttgttgatattgttgtattagaatgattattaagaatgggccctttcactccaaaaggtgtcccaatttggatgataaattatatagtcaccgacttaagacctatgaaccaaatctagtggtgaattctggttcaaacaaagcaattgtgacacacatttgagacgactggtgaagtttgaacatggactagacatttgataggaaggaatcagtgttaacctttttagatgtgatagtggtcttaaagtgctcttacctcttagagatacatgctgaagtaaatggatgaaatgatacaggatttgtttcaaaataatcctgggtttatggaggagttgagtggccagtcctgttggtaaatgtctgtactccacttgttggtaaatgttgaagctgggtaatgaatacaagggagttaattatactgttctctctacttttgtatgtgtttttaaatcttttattactgaaggccaggtgtggtggctcatgcctgtaatctttggaggtcaaggtgggcagattgcttgagcccaggagtttgagaccagcttgggcaacatggtgaaatgccatctcttcaaaaaatacaaaaattagccaggcatggtggtacatgcctgtagtcccagctacctgggaggctgaggtgggaggatggcttgagcctgggaggtcaaggctgtagtgagcactactcatgccactgcactccagcctgggcaacagagtgagacttgtctccaaaaaaaaaaaaaattatggaaaaggtaagggaaaatatgatgttgaataaaacactggcaactttaattttagtaataaatatttatttgcatcatttacaggttgtaagccaatgttgtgaggcttcaagttcagacatcactgagaaatcagatggacgtaaggcagctcatgagaaacagcataacatttttcttgatcagatgactattgatgaagataaattgatagcacaaaatctagaacttaatgaaaccataaaaattggtttgactaagcttaattgctttctggaacaggatctgaaactggatatcccaacaggtactttaaaagagaaatagaattgttaaattttttgaagtcgaattcaactctatgtagtgtcagatgttcagaaaaattaggtcctgccattgcctgacagaaatttaacatctcactgtaatcaactcaaaatgggaaaactggaaccttaaaatagttttaatcaagtgtcatgatacaggtggtatcacaattcagtataatttcacatactttcagggagttgactttgttaataggggattttttaaaacaaatacaaacctagcactgtttgtaaaaggacattttaataccacaaatatgggagagatgtaactgactaaatctagtttaatgcaaagtttaccacattgtgcattttgttctgtgtccctctcattttgtcatagactattgccatttaggaatccctgttttaagagatcagggatcaccatggaccattagcatttaggaatcaacattttgagagatcacatatggcaaagatcattataggctgtaatgattcagggaggtcttcatggaagagatgtaacaagctgttttacacagcatgaataattgggttcttcattggattatggtaatggttgcacaccctgtaaactcactaaaatccactgaattgtacacataaaatgagtgttttatggtatgtaaattatatcacaaaactcttttttttttttaatttaaaaagcaattgttaaaaggggatggtgctacatagaatgttggtttatttattccccaagagacctgtaggatttactgtctacttttcaatgaagttaggaatgtaaatgttgagtgaaaaggcaagtacttttgtaaatcatgagagcatgagcttattacagagaaatataactgggggcctgatgcggtggctcacacctataatcccagcacttcgggaggcaaggcaggaggatcgtttgagcccaggggttcaagaccagcctgggcaacatagtatatgtatataactagttaatatttaaccaccacaccacatttatagtgaaatgattactcctatcaaagtaatcatgttgggaaatctactcattccaataatgctgccatttttttcagaacactataactccttttagagcttataacacatcttttatatatcctcagagatggtaaacttcatgttttagagagtaggatgaatcttgaaaacagtaaagtctgtcatcaaattagaaagtattgttagttgcaaacaatgtctgacaggtagcaagactgatcctcatatatggcaattatatttttatatttttagaagacaagattaattaggaagttttaggtttttttaaaaatatttacatctcatactttaatttttacctcttatctaatgtccgttaaaggtacgacaccacagaggaaaagttatttatacccatcaacactggtaagaactgaaccacgtgaacatctccttgatcagctgaaaaggaaacagcctgagctgttaatgatgctaaactgttcagaaaacaacaaagaagagacaattccggtaaatttaaaggatcatattttataatagaactcttttatgaactcttgatgtggctgacttcatgtgaagaattttactgtttacccctcaatcttaccccgcctctcattaatgataggcctagcccttaggcttgtttcttttaatcttactagtttttaaattatgctagtagataataatagccaatacttaatattgtgcttagtaacattgttatataggaacctctactctctataaaaatatattaggaattattttcattaatttgtagactttctaataattttgttgaggtttaacttttatattataccatgggcattgtgttatactcaaagctgctgttactcttgtgatgacttttaagcccttggacttagtcactcatccagtttcttcttttaggatgtggatgtagaagaggcagttctggggcagtatactgaagaacctctaagtcaagagccatctgtagatgctggtgtggattgttcatcaattggcggggttccatttttccaggtatgtcatatcagataacccttccacatctgatgtaagtcattcatttactattcattataaaggtattgttcgtggtgagcagaacaacaaaaacctttcaattattccttaggatggcttgttaacgcttatgatttgaattatttacaaaaatctgatattgataaggggttttctgtagaataaatgaaggcagaatttgacttaatctacatccttagctgataatctttagctattgtatttattccttttctgcttgctatatactcagacactgagagcagtcatttctcttccttctacctttgacatgtaagtcttggaacctatctctgcccataatcagactttgaaggcaaagtgattgaaaagattgagagactggaggcctcttaggttatattagtgatttctcctgcctgaggctcttctcttgtaaactgttgccccatgtttcctgagcaccttgcctgctctaatccagtgtaattaaatcctgtgacctctcctacccactcttcttttttttttgagactgagtcacccaggctgaagtggagtggcacgatcttggctcacttaacctccgcctcctgagttcaagtgattctcctgactcagcctcccgggtagctaggattacaggcatgcaccaccacacctggctaatttttttgtatttttagtagagacagggtttcactatgtgggccaggctggtctcaaactcctgacctcaagttatctaccctcctcggcctcccaaagtgctgggattacaggcgtgagccactgtgcccagccctctacccacttttttttttcttttgagacggagcttcgctcttgtttcccaggctggagtgcaatggcacgatcttggctcaccgcaacttccacctcctgggttcaagtgattctcctgcctcagcctcccgagtagccaggattacaggcatgtgccaccatgcctggctaattttgtttttttttttttttttttttttttttttttttttttttttagtagagggggtttctctgtgttggtcaggctggtctcgaactcccaacttcaggtgatctgcctgcctcggcctcccgtagtgctgggattacaggtgtgagccaccggcccggcccctcctacccactttttaacactgttgagaacatagttggtttatgattcatctcagcattgatgactgagtacacaatcaatgtcaccagtcccttaatgttctctatgggtaagtaggaggattccaatgaaatacaacttccaagtgaggctctataaagtgctggtatcttttcctctaatttgagggtacaagcctagacagagtgtgtgaaggaaaaatttccttacgtaggacattggtatctacatttacagttgaagttctacttctgagatgcatatgcttgtaccttttttttttttttttttttttaaatatatatagagagagggtcttgctatgttggccagactggtcttgaactcttggcctcaagcagccctcctacctcagcctcccaaaatgctaggattacaggcatgaaccactgcgcctggctgcttgtaccttttttgtgtgtatgtcttgttttgtttttttgtttttgagacggagttttgctcttgttgcccaggccagagtgcaattgcctgatcttggctcaccacaatctccgcctcccgggttctagcgattctcttgcctcatcctcccgagtagctgggattacaggcatgcaccaccacacctggctaatattgtatttttagtagagaaggggtttctccatgttggtcaggctaatcttgaactcccgacctcaggtgatccgcccgcctcggcctcccaaagtgctgggattacaagcgtgagccaccgcgctcggcctgtaactgttttttaatagatctacagctccttcccttaaggtctaaagattctccatccctgctttcaacagttaacaaagttccaactcagattctcataaattcctccctgtcttcctctgggcaattttattcccaaattcttgccaccttttgctttattccttactattagagaactataaatatgtttctttcagttttcatccttttcttctatcttataaagttaggaaagggggaaggataagagaacctggtgactacttaatccctggtcagaaatcgttttattattattatctgtggcattttgaattaggcttagtgattcagctatggcaaggaagtccctacagtaccagaaagggtttgggatggggttttagaccttcagctgaagtccagaaatgatcttttccctagtagcagtgtgatgtggggattttctctgcgtttaaaactttaaaagttggtttacaatttgtctcagcattgatgactgagtgtacaatgaatgtcaccagtccattaatgttctgtatgggtaagtaggattccaatgaaatagaacttccaaatgaggaatatgaaataggttttacaaataaaataaaatacaattttaaaaaacaagtaaaagtgtttttaaggtggcccatataccagtttctctgcttaaaacagaattggcttttctgcatgacagcaaatctttgtttccttagagcagggtttcttgacagcagtgctattggcattttaaactggataattctttgttgtgatgggctttcctgtggactgtactatgttggtacacaagaaaaacagtgtactatgtgaatactcactcaaagccagtagcactccctgattgtaacaccaaaaaagtctctcagcattgccaaatgtcccctgtggcagcagaatcactccctgatgagaaccactaccctggagtaaaatctataactatgtcttagaaaataacacagaaaattaatatttctttcactctactccttccattagtgatcaaataaagaaggcatttggcgctacttgccaaattgttggctcaaacttgtgctgaaccttttttggttttctacacttaagtttttttgcctataacccagagaactttgaaaatagagtgtagttaatgtgtatctaatgttactttgtattgacttaattttcccgccttaaatccacagcataaaaaatcacatggaaaagacaaagaaaacagaggcattaacacactggagaggtctaaagtggaagaaactacagagcacttggttacaaagagcagattacctctgcgagcccagatcaacctttaattcacttgggggttggcaattttatttttaaagaaaacttaaaaataaaacctgaaaccccagaacttgagccttgtgtatagattttaaaagaatatatatatcagccgggcgcggtggctcatgcctgtaatcccagcactttgggaggctgaggcgggtggattgcttgagcccaggagtttgagaccagcctggccaacgtggcaaaacctcgtctctgttaaaaattagccgggcgtggtggcacactcctgtaatcccagctactggggaggctgaggcacgagaatcacttgaacccaggaagcggggttgcagtgagccaaaggtacaccactacactccagcctgggcaacagagcaagactcggtctcaaaaacaaaatttaaaaaagatataaggcagtactgtaaattcagttgaattttgatatctacccatttttctgtcatccctatagttcactttgtattaaattgggtttcatttgggatttgcaatgtaaatacgtatttctagttttcatataaagtagttcttttataacaaatgaaaagtatttttcttgtatattattaagtaatgaatatataagaactgtactcttctcagcttgagcttacataggtaaatatcaccaacatctgtccttagaaaggaccatctcatgttttttttcttgctatgacttgtgtattttcttgcatcctccctagacttccctatttcgctttctcctcggctcactttctccctttttatttttcaccaaaccatttgtagagctacaaaaggtatcctttcttattttcagtagtcagaattttatctagaaatcttttaacacctttttagtggttatttctaaaatcactgtcaacaataaatctaaccctagttgtatccctcctttcagtatttttcacttgttgccccaaatgtgaaagcatttcattcctttaagaggcctaactcattcaccctgacagagttcacaaaaagcccacttaagagtatacattgctattatgggagaccacccagacatctgactaatggctctgtgcccacactccaagacctgtgccttttagagaagctcacaatgatttaaggactgtttgaaacttccaattatgtctataatttatattcttttgtttacatgatgaaactttttgttgttgcttgtttgtatataatacaatgtgtacatgtatctttttctcgattcaaatcttaacccttaggactctggtatttttgatctggcaaccatatttctggaagttgagatgtttcagcttgaagaaccaaaacagaaggaatatgtacaaagaataaattttctgctcacgatgagtttagtgtgtaaagtttagagacatctgactttgatagctaaattaaaccaaaccctattgaagaattgaatatatgctacttcaagaaactaaattgatctcgtagaattatcttaataaaataatggctataatttctctgcaaaatcagatgtcagcataagcgatggataatacctaataaactgccctcagtaaatccatggttaataaatgtggtttctacattaacctgcttgctccataatttcttatctggcaatgggtatatttagagggttaggcaagctgcattcacattcccaaaataaactatgcaggtaccaccaaagaagaaggagcctagtaaacttgcaggcttttagttgcactccaaggggctatcctaggtgcaaggttagtgagaagtaggccctcacacagcctgaagtccagctttaagtcatctcattccatgactgtttaagttatctgagaatgctgatgcaactaatttcactgcctcacagaagcaaaaataaatctccagataattttaacatccagaaccataaattagctctaccaattttcatacacaatgtcgggccctcagaatgtaaccaagagtagcatcagcaaaaatggccaagtaggtagcttcaaggaccttttcctccacagaaacattgaaaaatcaagcaaaaacattcagaaacaactttgtcagaacccaggaaaatagtttacagcaccaagcatttgctgaatcaagaaaaaggcaacctagaaagaaggaaagcttggcagtgttttacttgccctttccccattctcagctctgcaacagtcttgaagacacagaacacattctcagcgtggagtcctggtcttgggtttctagggagaagagagatttttttttttttttttggagacagtctcaccctgccacccaggccagagtgcattggcatgatctcggctcactgcaacctcccgggttcaagcaatttgtgcctcagcctcccaagtagctgggaccacaggcacacaccacgacacctgctaatttttgtatttttagtagagacggggtttcaccatgttggccaggctggtctcaaactcctgatctcaggtgatccacccttttcggcctcccaaagtgcttggattataggcatgagccaccacatccagccccagagattttattcttgaaagattatgtttgttctgacctgtctggcagcctcaaggactgacaaaaggcacctgcatttgtttcgtgtaactcagaactcagtcatggtgtgaaattggcatgtttgtctctaaatattgtaaggcaaatgaacaacctgctgccgcctgaggcaaaaagttaccgttgaggtaaacaaaggagtgcctaaagcctgagaggaaagcagcagaatttcttagggaaattaggttattcaaaagcacccatgtatattgggggatttagaaagccatgcacagtcccaggtcagtctgcacattcaaacctgagaagaccccaagatttcatgtctggctgatgtgtaggctcagtgcaagcaggaagtaaaggctaaggccaatttcagatgggccggataggcactgaaggtgtgtcccaacacagccaatcagcaaaaactgagggtttttttcttcccttgtcaatttttggggcaaccagttttcaaagaaatctcatcacactggctgaacgctagcaaaaggaagacaccttacagaccgtgtaagtcaaagaacagaaactttacaaaaacaggtcagaaaagtcactaggaccgggtgctgtggctcatgcctgtaatttcagtattttgggaggccaaggtgggaggatcacttgaacccaggagttcgagacctgcccgggcaacatagtgagaactcgtctctataaaaaaaaaattttttttaattagttgggcatggtggcacaggcctatagtcccaaccacttgggaggctgaggtggaaggattgattgagcccaggggtttgaggctacagtcagctatgattgcgccactgcattccagcctcgggaacagagtgagactttgtctctaaatatatacaagtcactaaacaaaccactacaacccacagcaagtaacaaaaaccctgaggagtgaagaatctggtttccagagttaatagtaaagtaatattcagctttcaacaaaaaactgtgaagcatgcaaagaaagtatagcccactcagaaaaaattagaataaactatctgaggaagcatagacattggactttaagacaaaatttgtaaatcaactgtctcaaaagtgctcaaagagctaagggaatacagggaaacaatgtctcatagagattgtcaaagaaattataaaaaggaaccataaaaattagctgaaaagtgcaataaaaaaaagggggaaaaaatggttctaatagcagatatggccagacagtagaaagaatcagtgaagctgaaggtagatcaattgaaattatccatctgaggagcagaagaacaaaggaaagaagcaatttaagaaagctatggattaccaccaagcataccaacctttgcaaaataggagtttcagaaggagaggagagagaaaggggcagaaagaatatttgaagaaataatggccccaaacacctcaaatttgtgaaaacacttgaatgtacccatccaagaagtttgcagaactccaaataggataagtcaggaaagatccatgtcgagacatatataaactgtccaaaactgaaaagaggatcttggaagcagaaagacagtggcaatcagagaaatgcaaatccaaatcacagtgagataccacttcacatccagaaggatggctataacaaaaaatacagaaaaaaaaaagtggtgttggggatgctggaaaatgggagccttcttgttttctgagatggagtgtcgttctgtcacccaggctggagtgcagtggtgctatctcagctcactgcaacctccaccttttgggttccagtgattctcctgcctcagcctctggagtagctgggattacaggtgcttaccatcacacccagctaattttttttctggctaatttttatatttttagtagaaatggggtttcgccatgttgcccaggttagtcttgagctcctgatctcaagtgatccacctgtcttggcctcccaaagtactaagatttcaggcgtgagccaccccgcccagcctgaaaatgggaaccttgtacattgctcatgggaatgtaaaatggttcagccactgtagacaaagagtttggtggttcctgaaaagataaacagaattaccatatagcccagcaattccattcctagctgtcttcccaagagaaaagaaaacatgcatccacaaaaatttatacacagatgctatagcagcactattcacaatgacccaatggtgtaaacaacccatcaatatatgaatggataaacaaaatgattatatacgtatgatacattactcagccataaagatgaagtacagatacaggctaccatatggataaacctcaaaaacattatgctaagtgaaagaagacacaaaagttcacatattctatgattccagttttatgaaatatccagaataggtaaattcatagagtcagcagactggtggtggttaaatctggtgtgaggggaatgcagagtgactgcttaatgggtatgggattttcttctggggtgttggaaatatgttggaactagcctgtaatcccagcactttgggaggccaaggagggcggattacctgaggtcaacagtttgagaccagcttgagcaacattgtgaaaccccgtctctactaaaaatacaaaaaatagccaggtgtggtgtcgggtgcctgtaatcccagctactcgggaggctgaggcaggagaatcgcttgaacttgggaggcagaggtcacagtgagccgagattgcaccactgcacttcagcctgagtgacagagtgatactctttttcttgtttgtttttgagacagagttttgttcttgttgcccaggctggagtgcaatggcgcaatctcggctcactgcaacctccgcctcccaggttcaagcgattctcctgcctcagcctcccgagtagctgggattacaggcgcctgccaatatgctcagctgatttttgtatttttagtagagacagggtttctccatgttggtcaggctggtctcgaactcccgacctcagatgattcacccacctcggcctcccaaaatgctgggattacaggcaggagccactgcacctggccagggttcttacactatatatgaatcagtataataatttttgaaagtagaccatggttaattcatgatgtatattgtaagcctttgggcaataactaggcaaaaattttaatggatataaaacagattcataaaagtactcagttaattttagaattacagaaaatgaggaaaaggggacaaagaacaaagaaaataaacagaaaagaagtagcaaatggatatatttaagcccaataacattaaatgtaagcggtttaaataaactaaaagatagatcatcagattggataaaaagtaattataatctatctacaagaagcccacttcaaatagaaaagatatatacagataaacaagaaaaggatgggaaagatacacaaaccctcatcaaaagaaagctagagtgtctatattactaccaaagttgactttagaatgaggaatgtcaccaaggataaaaaggaacattacataatgataaagatgttaattcacaaagaggtataacaattctacatatgtacgtacctaacaacagaggtgctagaaactgacaggactgaaaggagaaataaacaaatccacagttatagctagagacttgagcattttaagtaacagaactagaaagaaaatcaataaagatattgaagacctgacaactctgtcaaccaccttgacctaatgaatatttatagaacaatatacccaacaataggggaatatattatttgtgaagtgcttgaaacattcaaacaatatgaactatattctgggtcattaaaaaacaactccacaagttttaaagaattgaaatcatacaagtatgaagtcaatacatacaacttgaagtcaacaatacacacaacttgaagtcaatacaagtcatacaacttgaagtcaataatacatagttggggattttccaactatgtattattgacttcaagtttaactcaattttaagtcaagtctaattccccaaatatgtccaaatatttggaaattaaacaacacacttctacacttgatcttagccaaaaggccgagaaacgataaacaacacacttctaaacctactcatcaaagaggaaatcacatgtaaaactagaaaaatttaaacggtggcttgtgcctataatctcagctactctggaggctgaggcaggaggatcacttgaggtcaggaatgtgagagcagcctgggcaacatagcaagaccccatctctagaaaacaaaaaaattaaaaatttggctgggtgcagtggctcacgcctttcatccaacactttgggagtcaaaggcaggcagatcacttgagcatgggagttcaagaccagcctaggcaacctggtgggacccccatctctaccaaaaatagaaaaaattatctgggggtggtggagcatgtctctattcccagcttcttggggaggctgaggtgggaggattgcttgagcccaggaggcagaggtggcagtgagccgagattgtgccaccgcatcttggcctgagtgatggagtgagatcccatttcaaaaaaaaaaaattagctgagtatggtgacacacacctgtagtcccagctgaggctaaggcaggaggatcacttgatacacatatgcatacatacatacatatatgtatgtaggtgtagttatataatatatataggtatgtacaactataaatttcttcctcagcactgctttagttacatcccataaattttggtgtgttgtatatttgtttcattcctctcatagtattttataatatcccttgtgactttttctttaaccaacgggttatttaggagtgtgttgtctaatttcctcatatctgtgaacttctcaaatgtccttctgttgtttatttctaattttgttccattatagttggagaaaaatacttggtattactgcagtcaatttaaatgtattgagatttgtctcatatgtcataggcctaacatatggtctatcctggaaatgttccattcccacttgagaaaaatgtatcttatactgttgtttggtagaatgttctataaaaatctgttaggtctaattggattatagtattgttcaagtcttttattaccctcttgatcttccgcctatttgttttattagtaaaagtggcatatttaagtctccaactgttattttttaattgtctgtttctctcttcaattctgttatttttttgtttcatgtattttggggttctgttgttaattacatatgtttgtagttatgccttgctaataaattgatattttatcattaaaatatatccctttttataactggtaacaatttttgccttaaaatctattttgtgggatactagaatagccactgcagttctctctgagttactgtatgcatggtatagcttttgccatctttttttttttttttgagatggagtctcacttgtcacccaggctggagggcaatggcatggtctcggctcattgcaacctccgcctccaaggttcaagcaattctcctgcctcagccacctgagtagctgggactacaggctcatgccaccatacctggctgatttttgtatttttagtagagacagggttcactatgttggccaagctggtctcgaactcctgacctcgtgatccacctgccttggcctctcaaagtgctgggattacaggcgtaagccaccacgcctggctgccaaccttttactttcaacatattcatgtctttgaatctagtgtgtcacttgtaagacaacatatagttgaatcattttttaaatccattctgccattctcttacttttgactagggtgtttaatcaatttcaagtcattactattaaggaaggaattatgtctgccattttgctatgttctctatatgtcttatgtcatttttcctttctattttccattattgtcctcttttgtattaaatagatattttctaatataccattttaattcctttgtcatttttttttttttactatgtatatttttgagtcatttcccttgttgttttggagattacaattaacaacttaatttaacaatctagtttaggttactaccaacttaatatcaatagtatacaaaatctagctcctatgtagctctgttccctttccccttctttgcaatgttgtcataattacatcttcatacattgtgtgcccatcagcacaggtttataattataactttatgcagtagtctttaaaatcatttaaaagaaaaaaagaattataagcaaaaatatattcatatggtcttttatatttatctatttagttacctttaccagtgctctttatttcttcatgtggtctcaaattactgtctcgtgttccttcatttcaagatggactccctttagtatttcttgtgtgacaggtttgctaatgacaaattgtctcagttttgtttatctgggaatgacttacattttgcttcatctttgaaggttggttttgttggacataaaattcttggttgacagtcttttttccagcactttgaatgtcatcctatggctttctggcctccatggttactgataagaagtcagctgttaatcatgtgaaggagctcttctaaatgattaattgcatttctctttcttcaagactcttttctttggattttgacagtttgattatgatgatgtgtataggtgtggatctttttaagtttgtcctagttggagttcattgagcttcttggatatggagataaatgtttttcagcaaatttattttgtttttcagcaaattgtttcttcaaatattatttctgtccttttctcttctactaggactctcattatgtgtatgttggtatacttgataatgtcccacaggtctctgatgttctattcatttttatttatccttcttcctttctgttcctcagactagacaatcacaattgacttttcttcaatttttcttcaactgacttttttaagaacttcaagatgcctcctgcatgaacttgtaggttttgtttgtgagttattgttgactctaaaggaacacctcgttgcagaaacaggaaccaggtctaggagttttactgtcaagccatataaatatgcctgacagtaggccttgagccatttaatatattcttcactgataattctggtgtttcctagagatccaatggatcaaaaaagacttttgctgagtcttggtttttacttaatcacatttgcttgtgagtccctctagtgaatttttaatttcagctattgcactttttaacattgttaaaaacatgatttcctttaatgctttgaacacatttaaaatatcttcaagtatagtttctatagattgctattttcctgtgtaagaacaatactttatttctttgcttgtctcataattttatacagaaacctgacatttcttttttgttgttgttttttgagatagagtctcactgttgcctaggctggagtgcattgttgctatctcagctcactgcaacctctgcctcccggacttaagcagttctcatgcctcagtttcctgagtagctgagactaaaggcatgtgccaccacgcctggctaatttttgtatttttagtagagatgaggtttcaccatgttggccaggctggtctcaacctcctgacctcaaatgacccacctgcctcagcctctcaaagtgctgggattacaggcatgaactaccataccaggccaaaaactgacatttctaataatacaatgtgactactctggaaatcaaagtatttccccttctaaggacttgttgatgttgtttttttgttgttgttgatgttgggtttttttttagtggcttttccaaatgaatctgtgaagtatgtcttctttgtcactgaattctctgctcacttagcttagtggtcagctagtgattagatagttacttaaatgactgaatctatttcccctcccagccatttccaagaggctctgtgtatgtttgtgttggggcacccttcacactcaggcaggcatttaaaaatgctgacttagctttcatcatttttttgcagtgcctcaaggtcagccagatgttgtgttagaacttaggaccttcttaggtctttcctggcatgtggacagatttgagcatgcacataagcccatgtatgtgcatggccttctagagtcccatgaatatgtcagcagtttttttgtttttttgagatggagcttagcttttgttgccctgtctggagtgcaatggcgcaatctcggctcactgcaacctctgcctcctgggttcaagcaattctcctgcctcagcatcccgagtagctgggattacaggcgcccgccaccatgcctggataatttttgtatttttagtagagatagggtttcaccatgttggtcaggctagtctcgaacttccgacctcaggtgatccgccagccctggcctcccaaagtgctggattacaggcataagccactgcacccagcccctaatttttgtatttttagtggagatggggtttcaccatgttggccaggctggtctcgaactcctgacctcaggtgatctgcctgtctcagcctcccaaagtgctgggattacagttgtgcgccactgcacccagtcatgtcagcagtcttgaaagcctcctatggacacctcattccccagctcttctttcgatggttttttgtttgtttgtttgttttggctggggggcagcttgtttgcctcaaatgttaccactaccttagttagctgcatgttagccatgctactgattattttcaacaaatgtcccaggtgaaaggctattctcaccgagtggggtctgagttgggtcaaataaaggcaaacatttgtttgtttttttttttcgagacagggtcttgctctatcacccaggttggagtgcggtggtgtgaccatagctcactgaagcctcgaactcctgggctcaagcaattctcctgcttcagcctcctgagtcgctgagactacaggtgtgtgccaccacacctaatttttttttatttgttgtaggggcagtgtctcactctgttgcccaggctggtcttgaacgcctagcctcacacaatccttccacctcagcctcccaaagcaatgggattataggcctgagccaccgtggctggccaaggcaagtcttgtgaatgagggtttccaggcaattgtcagacaggccaaataaggacagttcttaaataatgctattttggggatctccaaacccattcggtcctagcaagtggctgctaggctactggtcttcactatgattgtagaactgttggttttgaagactaatgaggagttgaggagagtgttgagaataaggcaagttaaaacaccacaaagctcaccattcttactgagatacagccttaaaaaaaaaagttccttgggttgttgcaaagctttggttaatttcagaattctgaacatttttattttacaagttatctcaatattctcattgcttttatggaggaataggtttttagaggcccttatgccaccactcctactgacctcacctcattcagttatttgaaggcatcatgccattgtctgcttcaattttttctgttgcaaaatcatagtcagtttaattattgttcctatgaaaataatctttttctccttggttacttttttttttctttgagacagggtctggctctgtcactcagtctggaatgcaatggcacgatttcagctcactccaacctccatctcccaggctcaagccatcctcctacctcagcctcctgagtagctaagaatataggcacgcaccatcatgcccagttagtttttgtatttttagtagagacagggttttgctatattgcccaggctggtcttgaactcctgggctcaaagcaatctacctgcctctgctctttggttagttttaagatatttctgtatctttggtttttagcagtttttctctgatacacctcagtgtgactttgtatgtatcctgcttagggtttatacagtgctatagacctaattgtgtctccccaccccccaatccacatattgaagccctaactctcaatgtgaatgtatttggaaataggccctataaggagtgaattaaggtttaatgaggtcttgagggtggggttctgatactacagaatgtgtgcttgtaaagaaataccagagagcgccctttaccccgcatcccactctgccatgtaagaacacagcgaaaaagcaccatctgcaacccaggaagtgagctctcaccagaacccaactgtgctggcaccctgatcccagacttccagcctccacaatttgaaaacatttctgttcaagccacccattctggctgggcatggtggctcacacctgtaatcccagaactttgggaggccaagccagaaggatcacctgaggtcaggagttcgagaccagtctggctaacatggtgaaactacgtctctactaaaaatacaaaaattagccaggcatgatagcacgcatctgtagtctcagctactagggaggctgaggcacgagaatggcttgaacctgggaggcggaggttgcggtgagccgaggttgcgccactctgctccagactgagcacaactccatctaaaaaaaaagccacctattctatggtattttatggcagcatgagctgactaatacatagagcttcagtcccattctttttttctgagatgccagttacatgtatgttagacttctttaccataacctctttatgtttctcatccttttgcctacccatgccttagtaacagatgacccttaaataatgcaggggttagggtgctgtcccaccccatgcagtcgaaaatttgtatataacttttttttttttttaagatggagtcttgctctgttgccaggctggagcgcagtgggatgatcttggctcactgcaacctccgcctcctgggttcagggttcaagcgattctcctgcctcagcctcccgagtagctgggattacaggcgtgagctaccgtgcccagccgtgtataacttttgactccccccagagctcagctatgaatagcttactattgactggaagccttactgataacataaacagtccattaacacatattttgtatatgtattatatactgtattcttacaataagtaagctacagggaataagatgttatttaaaaagtcataaggaaaatatatttactattaagtggatgtggatcatcataaaggtatttgtctttatggtcttcatgctgaggaggaggaaaaggaggaagaggaagaagagggggggaggaggaggaagggttggtcttgctgtctcaggagcagcagaggtggaagaaaatctataagtggatccacacggttcaagcccatgtttttcaagggtcaactgtaactattttcttacaactatcacccagtctttttctctttttaactgactagccagtaagtaaatccatctcgtttgtaattttttgcatttttcaattctagaatttccatccgattactttttatagtttccagccaaagtactccatcttgtctttaaagtttttgaaaattcaatttttaaaaatcttgcttgggctgggcctggtggctgtggcctataatccctgcactttgggaggctgaggtggaaggactgcttgaggccaggagttcaggaccagcctgggcaacatagggagaccccgtctctacaaaacattaaaaaattacaccagtatggtggcatgcacctgtagtcctagctacttgggaggctgaggtgggaggatcacctgagcccaggagttgaagctgcagtgagatataatcacactactgcactccagcctagatacagagcaagaccctgtctcaaaatcttgttttgcaactccattagctgtatggtgcttttttttttcacagttataataactttaatttatcttgcattttacagaaatctatgaacaatttttaaaaagcacctccttacctcatatcatgtttctctgacaggtgttaaagtaggcaatgagtatgtcaacagcttgagcatcagcgtcttgtaaggacttcagaccaatcaaccactcgccaaaaatcttggcaggttttttatcttgtttttaatacaacggtatatccactctgatggcaaacctgtccagccacatctccacaacacgctttgcaaaatcagtgattagcaaattagttagctttggcacggtggtgtgctcacttgcccattacagcctggtagctggttttgatgctggcaacagaacatctagaatgacaagtttcgcactgtaggaaatagattcgcatgtccttctgcaggattgtgtccagtaatcggcacgtgtgacaagtgacatattccttgatatatcttctcaagacattttctatctgtttctgttggaatcttcctttgattacaagttggttattaccatctatagaaccacttgtacccaattcagccaacaaaaatgcacggagatgtttgggctgatgatgtaatagtttacagatatgtgtaaagttgacaaaagacgttttcttggttcctactcggacgacctgtggaggtttcatgacaaatttccttatgtccccagcaaccatacctggattcttttccctcatgatgttgaacactcgattcagtagctcctcatatgtgtagtctctttctgagcctgcccaagcagggcctgtctgattactgaatgagataccatcatcttttttgctgtcttcctcttctagaacttcatctttctctagtatttcatcctcatctgggaacttgaccttcttcttcttctttttattgccaagcataatgtcaaggtcattctctggttcagttggttcttgaacatcactttcaatcttaagatcctttacaccttcttcagcttcatcaatatcaaatatctttttagttttttttttctttttcttttgattaaagaagttcaagtcatctagatcaccagcagcatcttttttcctagtgtcctcttcatcagcttccaaatctttgtcctcagttggctctggccccacttcttttgtttctgaaggctgggttatctctgtttgggtatccgcttcctcatctaacataaaaggcttctttttcttctttttctttttgctcacagtaggatcaaaaatcatctcgtccccagacatggctgcggcttgagtgggcttggcacggacgggaagtcagacgggtcaaccccagaccccggctgcagcgctgctcctgccggtacctctcccaccaccgcactggtgctttgttgttgttgttgtttttctttctttctattgtctgtcttttctcttggttttggatcaagggctatctccttgtatatcagggtttttttttttgtttttttttttttttatatggagtcttgctctgtcgcccaggctggagtgcaatggcaggatctcggctcactgcaacctctgcctcctgggttcaagcgattctcctgcctcagcctccaaagtagctaggactagaggcgtctactaccacacccagctaattttttgtatttttagtagagacagtgtttcgccgtgttagccaggatggtctcgatttcctgacctcgtgatccgcccgcctcggcctcccaaagtggtgggattacaggcgtgagccattgcgcccggcccgtataccaggttctttttttaaggagtgtaaacagctatattttatgggtgcacaatatttttaaaattgtaacatttaagaactttttcatatctgctaattaattctacgaacaatattgatgcctctttaatatatgataggacactatttacttattttcttttttaaaaaattttaattaaaaaaaaaaagactattggctgggcgcagtggctcatgcctgtaatcccagcgctttgggaggccaaggcgggcaatcacctgaggtcgagagtttgagaccagcctggccaacgtggtgaaaccccatctctactaaaaatacaaaaatttagccaggcatggtggcaggcacttgtaatcccagctactcgggaggctgaggcaggagaatcgcttgaacctgggtagcggaggttgcagtgagctgagattgccctattacacttcagcctgggcaacaagagcgaaacttcgtctcaaaaaaaagaagaacctagtaacagtacactttaaattcttctctttaatcttttctatgattgtttttatttataaatgtgcaataaacccataatacattccactatatttctttttgaaagtcaataatttttatagagatcaaaaataaaagtaaaaaagtttttatatttaattttagtcatttccagaaatcttcattttttgtgtgtagatttctttgctttgtgtataataccagattctgtgatatcatattcctcttgcttaaagaactttttttttttttttttttgagacaagctcttgctttgtcacccaggctagagcatagtggcatgatcacagctcactgcagcctctacctcttgggctcaagcagtcctcccaccccagcctcccaaggagctgggactacaggtgtgcaccaccatgcctggctaattcttttctttttcctgtagagacaaggtctcactatattgcccaggctggtctcaaactcctgggctcaagtgatccaccttggcctcccaaagtgctgggattacagacgtgaacgaccgcgcctggcctaagaactctctttaacatttcttttctttctttctttctttttttttttttgagatggagtttcactcttgttgcccaggctggagtgcagtagtgtgatttcggctcaccacaacctctgcctcccgggttcaagcgattctcctgcctcagcctcccgagtagctagggttataggcatgtaccaccacgcctggctaatttttgtatttttagtagagatggggcttctccatgttggtcaggctggtcctgaactcccgacctcaggtgatctgctcacctcggcctcccgaagtgctgggattataggcgggagccaccgtgcctggccaatattgcttatagtacaggactgttggtaataaattgttaggtttgttttctaaagaagtattcattttgccttcatttttgaaaagtattttcattgagtatagaactctggttaaaagtgggttttttcaatattttttaaatgtcactttattgtcttctggtttgcacagtttctaatgaaaaacctggtataattcttatcttcgttcctctgcatttaatgtgtcttctgtttttggtcgtcttcaaaattttctctttctctttggttttcagtagtgtggtgggcggctaggttgctagagggtgtttcttttcctttgagacaagcatcttgctctgttgtccaggctggagtacagtggtatgattacagctcactgcagcctcgaactcctgggcaggagtcagtacagagcagcaaatgttgaggtttcacaggggcctctctggaaacctcgccctcaaggccctggcttgtcttaaagagctctgaaatgcctctgggatcatccttccattgccttaataaatggaacctggctttcctctattcctacaatctctttagcaaatttttgcttggctatggccttggtttgctctcctaaagatgccttttcactctttaccaggccaggctgtgaattttctaaatctttctgctctgctttccttttagtgataaattcaatctttaaattatttctcatcaggcctggtgcggtggctcacgcctgtaatcccagcactttgggaggctgaggtaggtggatcacttgaggccaggagttcgagaccatcctggccaacatggtgaaaccctgtctctactaaaaatacaaaaatcagccagacgtggtgctgcacgccagtaatcccagctaccagggaggctgaggcaggagaatcacttgaacctgggaggtggagcatgcagtgaactgagatggcgccatagcactctagcctgagcgacagagccagactccatctcaaaaaagaaaaagaaagaaatacaattaattatttctcatcagttctttggtaggggtaaaagaattctttctatcctctcacatcttactacatgcagttaaaagtagccacgaagctccttcaatatttttcatcttagagattttttccactagatattctatttattttttattattgtttatttttttgagatggagtttcactcttgtcacccaggttggagtgcaatggtgcagtcttggctcgctgcaagctccaccttctgggttcaagcgattttcctgcctcagtctcccaattagctgggattacaggcgtgcgccaccatgcccggctaatttttgtatttttagtagagacgaggtttcaccatattggtaaggctggtctcgaacttctgacctcaggtgattcacccaccttgggctcccaaagtgctgggatcacaggcatgagccaccgcgcctggcctactgtccatatttctatgaacattctaaacatcactgtagtaatctctaggaaggtccaaactttgctgacagcttttctcttcttctgagccttcttaagaattgcccttagtgcttcattcatggcagtctaggtgttttctagcccgctcctctaaattcttccagcctctatgcattacccagttccaaagttgcttccacattttcaggcatttgttatagcatcagccctgcttcttggtaccagttttctgtcttggtccattttgtgctgctataagagaatatctgaagactaggtaacttataaagaagaaaatgtatttagctcccaaactttcaagttctggagcctggaaagtccaatatgaaggtgccagcatctaatgagggctttcctgccacatcatcccatggcggaaaatgagagggtgggaaaggatgagagaaggctgaactcgattttataacaaacccactatcttgacgatgaacccactcccgtgataacaaccttaatccattcatgaaggcagatcactcatgacctaatcacctcttacacatcccatctctctttttttttttttttttttgtatttttttttaaatttatttttttattgataattcttgggtgtttctcacagagggggatttggcagggtcatgggacaatagtggagggaaggtcagcagataaacaagtgaacaaaggtctctggttttcctaggcagaggaccctgcggccttccgcagtgtttgtgtccctgattacttgagattagggattggtgatgactcttaacgagcatgctgccttcaagcatctgtttaacaaagcacatcttgcaccgcccttaatccatttaaccctgagtggacacagcacatgtttcagagagcacagggttgggggtaaggtcacagatcaacaggatcccaaggcagaggaatttttcttagtgcagaacaaaatgaaaagtctcccatgtctacttctttctacacagacacggcaaccatccgatttctcaatcttttccccacctttcccgcctttctattccacaaagccgccattgtcatcctggcccgttctcaatgagctgttgggcacacctcccagacggggtggtggccgggcagaggggctcctcacttcccagtaggggcggccgggcagaggcgcccctcacctcccggacggggcggctggccaggcaggggggccgaccccccccacctccctcccggacggggcggctggccgggcggggggctgacccccccacctccctcccggacggggcggctggccgggcagaggggctcctcacttcccagtaggggcggccgggcagaggcgcccctcacctcccggacagggcggctggctgggcgggggggctgaccccccccccacctccctcccggacggggcggctggccgggcggggggccgacccccccacctccctcccggacggggcggctggccgggcggggggctgaccccccccacctccctcccggacggggcggctggccgggcggggggccgacccccccacctccctcccagacggggcggctggccgggcggggggccgacccccccacctccctcccggacggggcggctggccgggcggggggccgacccccccacctccctcccggacggggcagctggccgggcagaggggctcctcacttcccagtaggggtggccgggcagaggcgcccctcacctcccagacggggcggctggccgggcggagggctgacccccccacctccctcccggacagggcggctggccgggcggggggctgaccccccacctccctcccggacggggcggctggccgggcagaggggctcctcacttcccagtaggggcggctgggcagaggcgcccctcacctcccagacggggcggctggccgggcggagggctgacccccccacctccctcccggacggggcggctggccaggcggggggctgacccccctacctccctcccggacggggcggctggccgggtgggggggctgacccccccatctccctcccagacggggtggctggccgggctgaggggctcctcacttcccagtaggggcggccgggcagaggcgcccctcacctcccggacggggcggctggccgggcggggggctgacccccccacctccctcccagacggcacggctggccaggcggggggctgacccccccacctccctcccggacggcacggctggccgggcgggggggctgaccccccacctccctcccggatggggcggctggccgggcggggggctgaccccccccacctccctcccggacggggtggctgcccggcggagacgctcctcacttcccagatggggtggctgccgggcggagaggctcctcacttctcagacggggcggttgccaggcagagggtctcctcacttctcagacggggcggccgggcagagacgctcctcacctcccagacggggtctcggccgggcagaggcgctcctcacatcccagatggggcggcggggcagaggcgctccccacatctcagacgatgggcggccgggcagagacgctcctcacttcctagatgtgatggcggctgggaagaggcgctcctcacttcctagatgggatggcggccgggcggagacgctcctcactttccagactgggcagccaggcagaggggctcctcacatcccagacgatgggcggccaggcagagacactcctcacttcccagacggggtggcagccgggcagaggctgcaatctcggcactttgggaggccaaggcaggcggctgctccttgccctcgggccccgcggggcccgtccgctcctccagccccacatcccatctctcaacactgttgcattagggattacatttacaacacaaaactttgtgggatacattcaactcatagcatttgcataatttatgaagttaaaaaatcaatcaaccaaaaaattgttcccccttaaacatgggagaaggaaagatgggctgaactaaggttttcggtttttttttgtttgtttttgtttttgtagagatggggtttcaccatgttgcccaggctagtcttgaacttctgagctccaaagatcctcctgcttcagcctcccaaattgctgggattacaggcatcagccaccatgcctggcctgaactagttttttctacagctatttttctgcaaccaggcaaaatttattctactctcctcaaacagaaggaagtagagaacttactgggtcaggcatagtgctaaacattttaaaaccatatgatatgagtgtgattattagccggcctttttttaaaaaggctaaactcaaaacaaaacaataaaacaacacatgctgagaaagagtaaatgccttgcccaacatcacagagttaggaagtttagagaaaagtccatacttttaactactgggtaacactaccttctatattcaggaatatatatataaacactgtataaaaaattcagatgctaaggaatatatatataaacactgtacaaaaaattcagatactaagcaaaggtaagaagatgagaatattgtccatgtgatatttggcgcattgccacactagtgactacagaatctagagtattagattcattgaatttccagctcttgaatcttcatgttatatgttcattataattaaatccactacaataacaacaacaaaaatcagatagtctggagcttctcaggacattcatttaccaataccattataacaaagctctttgagggcaggagccttgtcctattaatatttatattctccactagatatttatatctagtatgatagaccctggataaatttctaactgaaaatctccctataataacagatttccaaaatccagacaaggcacatttatttcaagtaatatttgctagagaaatgctctagtttaccataaaagaattagaagagccccttgagctacttttctccattatcattattgtagttgtcattggtattatcattattatcattaccatggcaaccaccatttattaagtgcttactctatgccagtgattgacatgcaacaactcattttatcatcacaatactattatgagaaagatattaccatccctatgctacttaaaggacactggggctcgaagaagttaagaaactaatcaggccgggcttggtggctcacacttgtaatcctagcactttgggagggtgaggcgggcagatctcaaggtcaggagttcaagaccagcctgaccaatatggtgaaacctcgtctctactaaaaatacaaaaaattggctgggcgtgttggcacacgcctgtagtcccagctactcgggaggctgaggcaggagaatcgcttgaacctgggaggcagaggtttcagtgagccaagatcacaccactgcactccagcctgggcgacagagtgagactctatctcaaaaaaaaaaaaaaaaaaagaggaaactaatcaaagcacacagtaaaattggtgggacttgaattcaaaatcatgtttgcatttgacccattattgggtatatactcaaataaatagaactcattctaccataaagacacatgcacttgcatgtttgttgcagcactattcaccatagcaaagacaaggaatcaatccaaatgtccatcctaagtagactggataaagaaaatgtggtacatatacaccatggaatagtacacagccataaaaaagaatgagattatgttctttgcagcaacatggatggagatggaggccattaccctaagcaaactaatgcaggatcagaaaagcaaacaccacatgttttcacttatcagtaggagctgaacattgagataaagaagggagcaatagatgccagggcctaattgaaggtggagggtaggaggagggtgaggattgaaaaactcccaaaagagttctatgcttattacttgggtgacaaaataatatgtacaccaaacccctgcaacatgtgatttatctatagaaccaacctgtacatgtacctctgaaactaaaagttttaaacaatcacgtttatttgactccattcattcagcttttcaaaaatatctattgcagctactatatgccagacactttttagaaaccgggttcaaaattcaaaaagtacaaaaatggcagcataaagccacttcccatttcattctcccctgcccctctccaccactatgtctacaccaccaactagcttcccccttttgagcaaccaatgttatcagtttctggtgaggcctgtaacttcagtcagggagttcttttttgggtcaaaccttggcgtgggcaatctctcctaccactctcacacctctccgaatgacctcagacttcttcaataagcattttttttttttttgagatggagtctcgctctatcacccaggctggagtgcagtggcacgatctcggctcaccacaacctccacctcccggcttcaagacattctcctgcctcagcctcccaagtagctgggattacaggtgcgtgccaccatgcccagctaatttttttattttgagtagagatggggttccaccatgttggccaggctggtcctgaactcctgacctcgtgatccacccacctcagcctcccaaagtgctgggattacaggcatgagccaccatgcccagccagcgataagccaatcttaaataattcagtgtttcaggcccatttcacgtctgggggaaacgtgtcctcaggaagccagcttatgtttgaactgagatgaagtccttgtggaacgggagagtgagttcctgtaggttaattcacaatgtctttaccatgaagcttctgtttctctaggaggcggccatcctcagctctcatagatccccacacttagaaagtccacactacttcccttccacctctgtctgaaccaagctctctctgacagccctgcagaacacaggtcttgcgacttcaaaatgtcgcatcacaacattttgttgccttttccttctctcaaaatagaatctttacagtgctccttaaagtgaaggatggtggaattttgtggccatatgatctgagaggacgttgtgaaaattttaaaaacagggacagaatttggactggctttcaggttttccaatagactttgagttctctggcagtaagtccctcttcccctactttctcggtgctgatgagaagggcacctggttggtgaaaaacatgcaaattaagaggcacaggatcaagaggaacaggctgctcctcttgaatagaggtgtccgtggtccagacagcatgagtcctggtttatcattgagattaatagtactggccaggtgtggtggctcacacctctaatcccagcactttgggaggctgaagctggcggatcacctgaggtcgggagttcgagaccagcctgaccaatatggtgaaaccgcatctctactaaaaatacaaaaactagccgggctgtggtggcacgtgcctgtaatcccagctactcaggaggctgaggcaggagaatcgcttgaacccaggaggcggaggttgcagtgagtcgagatcacaccactgcactccagcctgggcaacagagagagatcctgtctcaaaaaacaaaaaatggccgggcaaggtggcttgtgcttgtaatcccagcactttgggaggctgaggctggtggatcacctgaggtcaggagttggagaccagcctggccaatgtggtgaaaccccatctctactaaaaatacaaaaattagccgggcatggtggtgggcacctgtaatcccagctactctggaggctgaggcaggagaatcactcgaacccgggaggcggaggttgcagtgagctgagatcacgccactgcactccagcctgggtgacagagagagattctgtctcaaaaaataaaacaggctgggcgcggtggctcatgcctgtaatcccagcactttgggaggccgaggcgggcggattacgaggtcaagagatcgagaccatcctggctaatacagtgaaactccgtctctactaaaaatacaaaaaattagccgggcatggtggcgggtgcctgtagtcctagctactcgggaggctgaggcaggagaatggcgtgaacccgggaggtggagcttgcagtgagccgagatcgtgccactgcactccagcatgggcaacagagcgagactccgtctcaaaaaaaaaaaccaaaaaaccaaacctacacagttgtattgaggtgtaattcacatatcataaaatttacccatttaaagttttttttggccgggtgtggtggctcacacctgtactcccagcactttgggaggccgaggtgggtggattacctgaggttaggagttcgagaccagcctgggcaagatggtgaaaccccgtctctactaaaaatataaaaattagttgggtgtggtagcacacgccagtaatcccagctacttgggaggctgaggcaggagaatcacttgaatctgggaggtagaggtttcagtgagccaagatcgcaccactgcattccagcctgggtaatagagtgaactccgccttgtctcaaaaaaaaaaaaaagtttttttaaagctattcacaaagttgcgtaacaaccaccacaataactgttagaacattttcatcactccagaaagaaaccctgtacccaccagcagtcacccttcatttatccccaagttccccagccttggcaactactattccacttttcatttctacagatttgcctattctggacatttcatatacagcaggggtgtccaatcttttggcttccctgggccacactggaagaagaactgtcttgggccacactaaaatacactaacactaaagattgctaatgagctaaaaaaaaaaaaaatcacaaaaaatctcataatgttttaagaaagtttacgaatctgtgatggactacattcaaagccatcctgggccacatgagacccatggccatgggctggacaagcttgaaagatacatacaatctgtgggcttttgcgtctgacttcttttgaagataaatgttttcaaagttcatccatgtatcagatgtatctttttattaccaaataatattccattgtatggatataccacttttaacataccccttcatcatctgagggacatttgggttgtttccactttttggctatcataaataattctgctgtgaacatttgtgaacaagtttttgtgtggacatatgttttcattttgtgggaatatacccaagggtagaatcattgggtcatgtggtaactttgtttaaacttttcaggcattgccagactgcttttcaaagctgccgcttcattttacattgcgattagcaaagcatgggggggttctaaatctccacatcctcaccaacacttgtgtttttaaaattattatagctatcctagtgggtgtgaagtggtatctcattgtggttttgatttgcatttccctgatgactaatgatgttgaacatcttctcatgtgcttattggctatttgtataacttctttggagaaatatctattcagacctttagctcatttaaagaattgggtgctctttttattattgaattcatcatcactttttaaattgagcagttacctaaagctctacctaaagctccatggtcagtaaaattcacccacatgacagtggtatgtgaggcaccttgtagtatgtaaaatgtggaaaaaggccaggtgtggtggctcatgtgggtaattccagcactttgggaggctgaggccagtggatcacctgaggccaggtgttcaagactagcctggccaacatggtgaaaccccgtctctactaaaaatacaaaaattagccaggtgtggtggcaggtacctgtaatcccagctacttgggaggctgaggcaggagaattgcttgaatgcaggaggtggaggtttcagtgagctgagatcacgccattgcactccagcaagactccatctcaaaaaaaaaaaaaaaaaatttggaaaaagaacgtcactgaagcaatgtcatgatgcctactgcttatgtatttctgggctctgattccatttatgatggggatgaggcatctctatttgatcagattagtattttgtaagttagtaaaccactaaagcactaattagattttctcaaatatttgaaaaatatatgatttgatatgaaatttaataaatgatttagtcatcccaacagttgaagacaataaaacttagtgtaagtataaatagaaccaagttgttataataaaatccattgatgctttcaagctatagctaacttgaatttttacctctacatacatttattaaaagtaagttgcaaaaagtttacctaaattccttctagataaattacaaatgagaactaccttctcttcttacaaatttggtcttttgcacaacagcaatggctaaaataaatggggccaaatttttggagaaagtcttgtttaattcagaatataattaaaatctcatggagctttattggttttagtatccagcagagaaaaaatattgaaactccgagagattttgaattaaatagctacaacagttttgttttattagttctgactgtgcgaaaaaaaatcataaggacaactttggaaaaatctagttcttttagggccccaaatgacttttaaaacaataaaacaaactataaaacgtacacaagtgatattaaaaattatgtagttcaataaatgtgacattcacaaatgtggttgtaatttttttttttaactttagctaagtgaacatggatctgacgattggatgtagaaaaggtagtgttatatagcttaacagaattaagtgcttcagtttgccagtgaggattatgtagctgagttggaatgttttaccaatgccttttaagatctccatctacttcccaggatctgtggctaaatcaaagaaagagaggatgcttcttttattagtgattatttaataactctatgctagtgattatttccctagcattttaatatatatatttaaaatatttgtagatttagatcttttggctggtggctgaatcatgcacagaataaaccagtaccataaactaatactgtttctgaagatgggtaataaaggctggctagtgatttactgtgaaagcactaaatgaattggagtcatcatctgttactcgcagagtagaaggggcaggaaaaaggtgcacaatgaaaacaaaggggaaacattttgtgagaaaaataattagcacagttttctgcttagtttactgaggtcccaatctttcaagacccaaacataacttgtgaaggtaggtttgaacttcatataataactgttctttctttgtccccagagcttgtctctgtccttggaacacagaagagcacattgaattcatcaggccatgggatgagaatgatgacggtggagatggcacaacactggagctgacccacagagggatcaatgattcccaaataacccttcactgatagtttccaggggcaaggcactacctgaaattgtatgcaatcttcagaaatcattcaaaacattatgcctttaaaaaaaatggatggtaggccgggcgcggtggctcatgcctgtaatcccagcactttgggaggccaagatgggcagatcacaaggtcaggagatcgagaccatcctggctaatatggtgaaaccactgtctactaaaaatacaaaaaaattagccgggtgtggtggcaggcgcctgtagtcccaactactcgggaggctgaggcaggagaatggcgtgaatccaggaggaggagcttgcaatgagccaagatcatgccactgcactccagcctgggcgacagagcaagaatccgtctcacacacacacacaaaaaaagtatggtaaaaaggaatttgagattaaaaaaagaaacagtgttttcattttttctcatttttatattgaaaactttcaaatctacaggaattatggtaatttaattgctatgtgtaattataaaaaagctaaaattagagtacaacaaatacttgtatactctgaaattatagtacaacaaacacctgtatactcttcacctaaattcaccaattaataattttcgatacaggcatacctcattttattgtgcttcacttcattgtgctttgcagatattgcagtttttacaaattgaaggtttgtgacgcccctgcatcaagcaagtctattggcaccattttcccaagaacatgtgcccacttcatgtctttgtgtcacatttgggtaattctcataatatttattgttatatctgtaatgatgatctgtgatcagtggtctttgatgttactattgtaatcgttttggggcaccacaaactgcacccatataagacagctaacttaataaatgtcgtgtgttctgactgtcctactcacaggctgttccccagtctctttccttctctccttgggcctccttattccttgagagacaacaatattgaaattgggcaaattaataaccctacaacagcccctaagtgttcaaggaaaagcaagaattgcatgtctctttcaatcaaaagccagaaatgattaagctcagcaaggaggccatgtagaaagttaagatccactaaaagttagacagcgctgtgaacacaaaggaagagttcttgaaggaaatttaaggtggtactccaatgaacaaatgaatgctaaaaagtgaaacagccttattgatgatctggagaaagtgcaagtggtctggatagaagatctaaccagccacaacattcccttacacgaaagcctaatccagagcaaggccccaactctcttcaattctatgaaggctgagaaaggtgaggaagctgcagaagaaacggtggatgttagatgaggttggttcacgaggtttaaggaaggaggccatcaccataagtgcaaagtgaagcagaaaatgttaatagaaaaggtgcagcaagttacccagaagatctagctaagatcattgatgaacgtagctacactaaactgattctacacgtagaccaaaaagccttctattggaagaagatgccatctaggactttcatagctagtgagaagtcaatgctggcttcagagtttcaaaggacagtctgactctcttgttaggtgctaatgcagctgacatttaagtttaaagcaatgcttattggccattctgaaaatcctagggcccttaagaactatgctacatctactctgcctgtgccctataaataaaataacaaagcctggatggcagcacatcattttactgtgtggtttactgaacactttaagcctactgttgagatctactgcccaggaaaaaaatatgcctttcaaattattactgatcattgacaatgcacctggtcacccaagagctatgatggagatatacaaagagatgaatgttgttttcatgcttgctaacacaacatccattctgcagcccatgaatcaaagagtgattttgattttcaaatcttattatttaagaaatatattttgtaaggctatagctgccatagatagtgattcctctgtgggcaaagtcaagtaaaacccttccagaaaggattcaccattccagaggccatgattcatgggaggaggtaaaaatatcattaacagaagtttggaagaagttgattccagccctcacagatgactttgaggggttcaagatttcagtggagaaagtaattgcatatgtgctggaaacagcaagagaaatagaagtggagcctgaagatgtgactgaattgctgcaatctcatgatacaacttgaatggatgaggagttacttcttatggatgagcaaagaaagtggttttttgagatggaatctacttctggtgaatatgctgtgaacattattgaaatgacaacaaaggatttagaatattacatagctggatgtaatggctcatgcctgtaatcccaacatttagggaggcagaggcaggagcatagcttgagcccggtagatcgagacatgcctgggcaatgaatggagcgagactccattctctacaaaaaggaaaaaagaaaaaaaaaaaaggacaaaaaagagagactattacacaaccatacttgatagagcagcacagggtttgagaaaatgaactccaattttgaaagttctactgtggataaaaatgctatcaaacatcaccacatgctacagagaaatcttttatgaacggaggggtcaacagatgtggcaaacttcatggttgtctttaaggaattgccacagccaccccaaccttctgtgcctcccaccctgatcagttagcactcatccacatcaaggcaacacccctcaaaagcaaaaagattatgacttgctgaaggctcagatgattgtcagcaattttttttttttgagatggagtctcactctattgcccaggctggtagtgtagtggcatgatctcagctcactgcaacctctgcctcccgggttcaagcactttccagctaatttttgtatttttagtagatacagggttttaccatattggcaggccggtcttcaactcatgacctcaagtgatccgccagccttggcctcccaaagtgctaggattacaggcatgagctaccactccctgccaatcgttagcaattttttagtaacaaagtatttttaaattaaggtatgtacgttgctttttaagacataatgccattgcacactgaatgtagtaaagtgtaaagataacctcctttacatgcactgggaaaccaaataattcatgtgacttgctttattgctatgtttatttattgaagtggtctagaactgaacctgtgatatatccctctttatatatacatatatgaacatatacatagatatgtgtgtataaatatacatgtagatgtgtatgcacatatatgtatatactgaagtatttaaaagtaagctgcacatatgacccatcactcctaaagactttagcttgcaactcccaagatcgcattttccaaagtaacctgcaataccaatcacatctaaaagattaataatgtcaactaacatatacttcatagtttgtccccattatccccccccccaataaaaagcaatgtcttttatagttttttttttttttttttttttgagacagagtctggctctgtcacccaggctagagtgcagtggggcgatctcggctcactgcaagctccgcctcccgggttcacgccattctcctgcctcagcctcctgagtagctgagactacaggcgcccaccaccacgcctggctaattttttgtatttttagtagagacggggtttcaccgtgttagccaggatggtctcgatctcctgacctcgtgatccgtccgcctctgcctccgaaagtgctgggattacaggcgtaagccaccgcgcccggctcctttatagttttttaaaatccagaatccagttaattgggatgatatgaggccttgtgaaaatcctcatcctcaacatttcacgtgttagttgatgatgattcttcttgaattattacgtttttcgattgtaccaatttttctacatctgttagctgacattcttccagctttcacatccactgcacctttctctctctgagtaccactatggactcacgaattgttatattcaaagtggtataatccctaatgtatttttaaagcttaaatcaccccaaattttgccgatggaaaccactccaaggtggtccctattttcttttcacggtttctgacacaagatgtctttgagcttaccttgtacttttcttgccctagatctagaatcagccacttcttcaaggacttacttatacgacgaataggtcatacatccatctagtgcaagtctccagatattcacagctatacatgccccctccaatcccacccctttcttcatagtcagccaatgttcgttatccttccagagatagtttatatcatggagtaatataaaaatttatgatttatatgtactgtataatagagcaattatattcttacctacccccaacatgctttaactcgaatgatagtgtagtacacttctgagtttgtctgggcttgtagctcttgtctgtcattagattctgaaagatacctattaacaataccctaaaaagatcaggagcctttaggccaagtctcaaacgtttcagatgagaaaaactcagggatggtgacttgacggaagttgcattaactaacaacgctcacatgctattctccggacttggaatgtccaagcaccctgggcttgctgacacccactcacttttcaaacatcaattcttgggaagcttttcccttccttaatgtcccccagataggtgatgtccccttgttacaggttttagaccattatgtacatctccttcctagcacatacatatattaaaatttgtttcctgtctccatgaggagagggactacatctgtccttttcactgctggcacacagtagttgctcaacaaaaatgtgcgaagtgaaactcgaacaggcggtcaggctcacagtccacgcctcttcctactgtggtcccgctgtgtttggacaaatagttccaaattataaactttaaaacctgagaagtctcaatagaaaaagcagggaagtctttccatttccatgattaatggaggaccttagcagaaacggctcaccgcgaggtgtgacgaccgcaggagggcgtcaatcaagaaaatgcccccttgccccggaggcgagtggagccgcacagagccgaggccatacgggccagcagtacggactgcttcaatagaaaacacgtgcaaaaccagagagccagactgcgcacagctgcgaccctcaagagccagcagaaaagacacggagcggcccccactggattgaagactgcacagcctctgcccggcgctgtaggacccgggcctccccttgattgctgctcgcagcggcttctgccagcatcctcgcggaagtggcttgagtccgaggcctccaaatgaaaccaggtggagcggccaagagtccgcagcacctgaactccagccatccgaatcccgccgggccgcagctaagggccgccgagcagccctaggaacccagggcactgtcccgctctgagctcgggaaacggccggtgtgacagccagcgccactgttaatccagggagcgcacccaccgaggaggcgtcttaggccagcggcctctgctcccgccgagtcccgctgctccccgcctggaaacagctgctgccaccccgggcccaggcctggacggcgcccccgaatttcggcagaggtgcctcggggccgcggacagggccgctggagcccgcactccagaaggcggtcttcctcgcgcctcccccgacggacgcggcccagggcttccctcgagggcgtcctcggccggggtgcctggagtccccaggggcgacagccgcggcggggcaccagggcgccagttccccggagcctggtagcaagcgcgtcccgggggcggggagcttggccggcggggcgggccggggtgggggcgggcggctgctcttggggccccgcgccattggccgcagggcccggcggcaggaaggggccagcgagcgcggccccaccccgcggccggcggagcctatcgccgggagcgcggagcgcggataaatgtagcgccgcggcgcgggccagcagctctgcgaggggccggagcgcggcggagccatgcagtacccgcaccccgggccggcggcgggcgccgtgggggtgccgctgtacgcgcccacgccgctgctgcaacccgcacacccgacgcccttttacatcgaggacatcctgggccgcgggcccgccgcgcccacgcccgcccccacgctgccgtcccccaactcctccttcaccagcctcgtgtccccctaccggaccccggtgtacgagcccacgccgatccatccagccttctcgcaccactccgccgccgcgctggccgctgcctacggacccggcggcttcgggggccctctgtaccccttcccgcggacggtgaacgactacacgcacgccctgctccgccacgaccccctgggtaaggcggccgggcgagggtgggggcgaggaagcgccacccggcaggtggcagcgcccgggaggccgagggggcgaagggggcaggcggtagacggctgtggcaaaagcgatggaaaagcagctgtcgggcacgcgcggggacgggaggcgcgcggccggggctgaccgcaccgtgactcagattggttttcctgcaccttgcaggcgtcggggcgcgcgggccggcggtagacctcgcggcgagggcagccgtggaccgcgcgtgttacccggggtggggctcccttagcgggagggacggggaaaggggcgtcgaggcgcccctggccggcccccgtggggcagggatcgcagccgggcccgggtggctacggggctggacctggttcaacaggcttgtgcagtgaaagagcctgaccctttccgttcatacaggaaatcttgagttctcgataggagtaaatctggtttcagaagctgttaagtgttttcctggctgcatgaagcagacccttcccccggagtagtgcacgctgctgattattttatcgacatcctcaatacagacaaattcaggaaacactcgacttctgatagccgggatccgtttttctgatattgttcatttcctctgtgtgggatgtgactttatggcagctaaaataaccagttgcttcctattttttttcgaggctgttttgcaccagtctgaagcctgacgcaagcaaaatctcgaaaaaacaatgctagctttcaaagcgttgaggtgcaggcctgcagacggacggacggaccgaccgacactactttgggagtaggaagcagcagctcctggtcgccagttaggaagggaagcagggacacatagggcatatattccagaacttcggggcttgtcccctcaatgtgcggcctaacaaataagccgcccgtggtccgcgctgtgggtgacccttggcgccttcgaggtctggagccctagggtaaataaggaaacggggcgcctctagagttttaaatgaactctgttattggaagcttcagtagggaccctgaaaacaattaacgtcttaattagcattttaatgtctccattattacggcgcgggctctagctcagccctttaccttaccttctcaccgttaacaggggagggggattgtatttttagttcatctttttatgtttttgagttgttatcctgtctgtctgattccagcctcgagggtttgatgatgcggcccgagcctggctgtggtcgcctgtcggggctggagcgggaccctcagccgggccgggcctgggggctaacgttttcacagtgcgccctgagtttccttgggttactgctgggaccgcgcaggaggaagcaaagagtttttcgagctagaccaacaggaaacacattgacggaaatgttgccatagcccatggggtggctttaactggccgcccccgcgggctgggtgtgaaatcagaggaggccgcggctcccccggccaggattggaggctcctcgcgcaacctaatgcgggtgtccgggcccgagcgcttcccgcgcagccaggccttgtcggtgcagcagccccgctcctccccaacacgcacacacccggtgttcgcaagtgcggctcaccaagggagatccaagggggcaaaaagttatgtataaatccgagagccactggggaaagagggtcgtggtattgtaagcccagccggtagtgcccattctttttggggttaaaggtatgtctggatttagttctaggtgtgacggctgtgtgtctgtctgtgtgtgtacaaggctgtgtgcatctgcggtgtcagtgtgtgactttgggtatgtttgtgtgtcggtgggaacgtgttaggtccacgtgccggtgggtgtatgtgaatgtgtctggttgggtggcctcctggcctacctttgtcatccctggggcccgacagctctggggtctggccaggccgctccagggcagtgggtgagcgccgctcttcccgctcgcaggcaaacctctactctggagccccttcttgcagaggcctctgcataaaaggaaaggcggccaggtgagattctccaacgaccagaccatcgagctggagaagaaattcgagacgcagaaatatctctctccgcccgagaggaagcgtctggccaagatgctgcagctcagcgagagacaggtgagctcgcggggggcctggggccgcctccggggaagggaaggcttctggggtaggggtcgccgggccaccgagagagaggcgaggagccaccctgccctctggcacgtcccgacgcgggctcgttgcaagttttctttctctctttcctgtaggtcaaaacctggtttcagaatcgacgcgctaaatggaggagactaaaacaggtatggacatggttctgtttctatggaaataaatatttttatcacgttatctcagtgcaaggctgttatgggttgtatgcaaaagtcatttaagagactatttaacctcttcaccttgattaaaaagacaaatagtcctgctgaaattcaggatgagttgctcaggtggcagtaatgctaaaagcacctaatggggttcctatatcaattatgcttgggttttcacacactggctagtaaaactcccagctaattgttttataaatcccatatgttgtttatctaattaacgcaggaaagataaagtaattgacagtaaatgacttaagcagttatctttgggagaaaattgtttcttttatttacacagccataataaaaccaggcagaactcaagggtaaatataaagaaacaaacacctttaagtcttgtttgcactgttttttagaagaattaaatgtcagggagtttaaaaattattttctatctaatgccagctcttaaaatgaaatataaaacttgtaagaaaatattcaagcctgtttggaaagtagcttaaactttctgacagtctttcttccagtgaccttgtttcgcaatatgtgataaaaagtaaaggctaatttagtttttaaaagaaggtctattgacttaaagctaaacattcatttttgatgtcctaatctggatatactctccaaagttatctgataattgctgaattgttcacttgtcattgtatatacggtttataataaatactttgaaacaatgagtggagaaatttaaagcaaagtggattttaaaatttattgatcattactttttcattaaaaagaaagtgtcccaaagaatattttgaaatagaaaataaaattcccataacttcattactgtaatgtgatttaaatatttgcagatccactctcaatttctgaccgtgtgcatctatttgttgagactataaggcttgcaactatataacaaatagatgttgtaatatttctatgtagtatttatatgcattttagacaagtataggattaaaaattcactagcttatatacttaatagttcttggtcaaaggcttgactctagtttaccagagaccttaaaaatagtggtttctatgtaatatggggatatttcccagaaatttgccccagattttaagtaaattgtagctaattgtctaccttctcagttggcagcattcttccagatccacattttttttctttgccatgattttgtaacttgttaaacatttacacatgtagatgtttataaatttactccagaaaatgaatgaaaaaagatccagtctaataattgaaactttattcttaattcaccagttagcattcttatttttaaaatgtctgaaagactgttaattggcaaggtttaaatatttaaagaatgaagttaaggtgtatctgtagtgatctgattttctttcccccttaaacttttgagaatattgaaaccatgggtctgggctggtgttaagtaaccagaatttgtgttcaattggtataatgtatctgcccttatgttcatgactggttctcatcttttaagcatataatctttgatatgacagaaacttttcttccaaagtgagcaaaaagcacaagtatgtatctcctgaataagattataaactgaaaacactcagtaaactaaaaattaaaagatggaataggatgaagagacattttgatttattcctctcacctatccatattttatgatccttccaatctccattttcatttcctttattcaggagaaccctcaaagcaataaaaaagaagaactggaaagtttggacagttcctgtgatcagaggcaagatttgcccagtgaacagaataaaggtgcttctttggatagctctcaatgttcgccctcccctgcctcccaggaagaccttgaatcagagatttcagaggattctgatcaggaagtggacattgagggcgataaaagctattttaatgctggatgatgaccactggcattggcatgttcagaaaactggatttaggaataatgttttgctacagaaaatcttcatagaagaactggaaggctatataagaaagggaatcaattctctggtattctggaaacctaaaaatatttggtgcactgctcaattaacaaacctacatggagaccttaattttgacttaacaaatagtttatgtactgctcttaggttgttttgataaagtgacattatagtgattaaattcttccccctttaaaaaaacagttagtggttttcactatttataaaaaattaattttgaactttttgttaaatttttaagttatagctttaaaggttttaataggaccttcttgaacgacttttctgtaatctgtttatctcccacttaatggaaaggcaaaggggtaccccaaatccagaggtgcctacatttcaggcagccttggagtattttaaaaggaaaacattctttacttttatatgacattcttatactgctgtctcaaatccaaaaacatttcagagctcttgtctcagagatgtgtgttctttttgtcagagatatggttgatgagaatcttaaatgcttgttttgcactatcacttagtacctgtttgaccaaggtgttaaggggatagtacctcccaattcaagcagagaaactgacctgactaaagttaatcgcagatgaactagaagtcacaggttaattaaatgtaagtagattgtagatactgttttatatcaaacaatgtttataatgtgtatatagaattgttcactgtaaaaaaaatggccaaaatgtgttttttttttaataagtaacttgactataaaataaagccgtccgtgggacgactgacctcgttgcaagtctaattctttgattttaaaaagtctgcacaccttttcttgacctcctgggtgcttggcgcggtgctgggctctggggacaggaagtgactggggctggatcttgctggggctctcgttccgagtcccaggaccgcgggtgggtgcctggaacgtgggttggggcctctcccgggccgtttgccttggggctctgctcctgccggcggattctgagcctgatgggttcgagtcccgggcacgccaggcgacgggaagagccgaggcccaggcccgctgcgccgtgaagcgcggggccgtccggaccccatcgattctcctcggcagccgggctggccctcgccgtccttgaccggctgagtcaacaccgcgtcatccctcggcggccggggctcgggaacccgctccgcgcggcggggcccggggtggggaagtccgagtggggggatggggggccctggccgaggggagcggggaggtggtttgcgctgagaactgttctcgaacccggggaacttcagaacctccttcagggcttgtggaaacccagccctgttcctggagttctgatctgttaggactggactgggctgggaccgggaatttgtatttccaacaagagctgaggtgacgccaaagctgcgggcccggacaccacccctggggaaccactgatgtgagcgcacggggtgcggaagaagcaggtgggaccggcactcctcctcccacctgctttcccgggtaactttggccagcaagaggctggggcggagggctgagaggagggaaaggcgagggggaacagaggaacgaggggcttatccaggctagtgggagtgaggtttgatggctgagcagagggcgcagggtggaggaaggggcaccatgaaatggagggagaatggggtgctgaggttaggtgggtgtgggggcccaggtttctgattgttcagggtattgctagtctgtgccagctgcttgcctagctgagccatcaggtctctgacattccaggaaaaccatgacagagatctgttggggagaggcctggaaatctctctctagccttggcctccatggaggaggcctctagttgtagagttgggtacttctggctaaggacctgtgaaggaatgacccgacccctggcctggcttctagggctgtggcgcccccagatatggacactcagatgaagacagtgaaaaagtcattgctgttagggagttgtcacatccggcttccttagattctaagaaggcccctggaattgcaggggaattaagatttctgagaaaagcagtactagtccttaagcagagaggtgtggatagacttggaagtttgaagatttgggttggtgttttagttcttggcctcaaatcatttgtagaacgaagatggtctagttgaaccatatgaaccccttccagctctcaaattcccaactcagttcatgccgtccttattgttctccctactccccatgtctcctcagccttggcacccaaagtggccacccagtgggagagtttcccttcccatcagctgtaggctccagaccctgcctaaaagattacatcaaggtttcaaaggtcataatccatctcgtctgaaaatgggactgtccatatcagatttttggagaatgggaggcttatggatgtaatattgaattaaagtaatcctgaaacctgtgtgtgtgtttcgcttctggagataaaccctagttaatgtttattcttgagagtaactgtatcatgactattcagcagagaaatacagactaatgtattgattcacactagaaaacttgaggggtaaaatctagttttaaagttgacaattccctgaaaccaggctgctttccaatttcaagcttatcctaactctcaccaagttgctcccattctgaatctaaacatgtccttaagaatcaagagcatgttaactggaggaggtgcagtattctcaggacacaggtaggcattcacttttctgaagtaccccattgcaaattgccaatgaagatttagaaattcctcctacgatccgggcatttttcatttgtttgtcttttggctatttcatgttgaagcagcacgtatgacctttacagcacaactcctgtcttgtttttaactctttttatcaggagattcaacttgaaaacggttatcatttagcagaaagacaaacagaaaagcacatttttgtaagcaaaacgttaatgatttgaagaattgccctaatttcaccatgacagtgtgtgattaatcccctgggtcgtgtacttatactttaagttattcagttcattggtctttgatattcagaaccctttctaacttaatatgatattgattttgttggatgatgtactttgactctttaaacaacatcacttttagagatgactagcctactgtgtagtattttatttagagaactattgcataacatttctttttcttactttttatggttttctcagggtgaaagctgataagacatcttgtgggaaaagaggaaaccatctctgatagtgaaagtaccttttctctttcaacttttctgacaagcttttgtgtgtgtgtgtggttttcattactgtgaatattcatcttagttaatgggggcaggacagggattcaagaaaacttatttggacttggggaaaacgcattttgctggggacagaagagacttactaaaattcccactccagatatattggcatgtggaagctgatgaacccaaaagctcctgattttgattttttttcaagatctaataatcaatgatcctttaaatctgtgattggagatacttatgtgactacttacaatatggggcagaatgtgaataccaaacaatcacccaggatgcttctaaatgattgggagttcaagccaggcactttgggagaccaaggtgggcagatcacctgaggtcaggagtttgggacaagcctggccaacatggtgaaaccctgtctctactaaaactacaaaattagctgggcgtggtggcacgtacccgtaatcccagctactcagtaggctgaggcaggagaatcgcttgaacccaggaggcggaggttgcagtgagcggagatcatggcactgcactccagcctgggcgacagcgtgagactgtgtctcaaaaaaagaaaaaaaggctgggcgtggtggctcatgcctgtaatcccagcactttgggaggccgagccgggcggatcacgaggtcagaagatcaagaccaccctggctaacaaggtgaaaccccgtctctactaaaaatacaaaaaattagctgggcatggtggcgggcgcctgtagtcccagctactcgggaggctgaggcagaatggtgtgaacctgggaggcagagcttgcagtgagccaagattgcaccactgcactccagctgggcgacagagcgaggctccatctcaaaaaaaaaaaaaaaaaaaaaaaagagaaaaagaaaaagaaaaaataaatgattaggagttcagtattttgtggtcaaagtaatcaggttgtactgacatttatttttcagtccatagaggttttaggaagtcccagttgggctctgtatatgtctaatctaattttgtcccttgatatgtattttttggtattgttgataactccaaataagaagcactttggagactcctcccactcacccaaagatctgagaccccaggtctacagaggagcagctaccccttcacatgtggctgtaggaaaaccagaatcaccccgttgtggatacaagcatggctagcagcaggggagatggaactctctacccctctcttgctggctggggccccgggggacacccgcatcctcagcctccggtccctcagttcctagagcggagcgtggctcccccgagaggaggcggcgtccctggcacgccgtgggccccgagtgtcagtcagaaaagctagacaccccgagtgattcccttcttttgagacagctcttgggttcgcagttgcaggcgggaaacctcttcagtcggatgtacacaaatctctctggataacacagagggctgctgcgaggggaccttggagctggcagagacatttcctgtctgcggaggatcttgactttggagcatccggccgtcgccgcgagcggccgaacactttcctgcgtcgctgctttaaaaaaaaaaaaaaaaaaaagtcactgccaatatcaggcgactttccacatgaaagccaatgaggccgcttcccacttaaaaaacgtttgtttaaaacgtattttctaagcattccttagactcccttttattttggagggggaatttggtatctttgaaaaaccttaagtattcaaaaatctcattctctctgaagacaacttcttagatgaacaagtacgggaaacagttaacagcagagggtccctcccctgctgctcgcagacgctcgcagtaagatatgctcataatcttgtttatgtttttctttcatggtttatgcccttccatccttcttctgctccccacttttccttccttattcattccctttctcttttttcccctttcccttttaggattcctcatcttcattcagtttacttccccatttagaatagaaaatgactaatctctactctttagatgtcactattggggccaagattttctttaaatttatagaaatgttcaacttttagctgaggtgagaatcctgtttgagggaaatgttgctggagtcctaatgcgttgctcccatcccgccagggatagttttttttttttttaagccaagataagcaataataataacatagtccaggtacagtggctcatgcctgtaatcgcagcactttgggaagccgaggcaggcagatggtttgaggtcaggagttcaagaccagcctggccaaaatggtgaaaccccgcctctgctaaaacaaatacaaaaactggcagagtgtggtggcaggcgcctgtaatcccagctactcgggaggctgaggcaggagaatcacttgagccactgcactccagcctgggcgacaaagtgggactccgtctcaaaaaaaataaaaaataaaaaataaaaaaataaaataacataaatagaagagtaataatccctgtgtctctagggtccaggcgctcagtagcactggagtgtaatggagctgacagagagagatgctgcaataagggatggacagcagatgctgtggcagagtctgccagggactcccaaccagagaaaaggaaaaggaagcctgttccacggagaaggatgatcctgtacacaggtctggaggtgaaagagggcagggagtatgcatgactggactccagagattttggatttcagaattttcagtgagggattgtggacctgtgttctctctacccaccacacaggtctctttgtttttgcattggcactttcctctctctggaactctctttcccccaaatatagcctcatggcttgctccctcctctccttcagacatggccttcccttgccacctttttacaatgccaacctcctcttcctatccccaacaacaatttaattttctctatttcacttaatgcaattggatataatatttttactgccttatttattatgtgtctctccttattgacatatgaacatcatgagggtagggatttttgtctgttatgttcactgttatgtatcttcagcctgacctattaggtgcttgttaaacatatgttaaattagtgaattactgagcacgtactatgtgctgctaaatattatgtaagtctttcacctgctttatatctttatatcatttaatcatcaaggaccctatgaggtagaggctgttatcaaccccattttctagataaggaaactgtcaccgagaaattaagcccaaaacctcaattactataccgatcaatgttgtaatgagaacttcctcactgaatctgttgcattcttgaaaaggtatcaaatcaagtctaactctagctataagaagagaattgaggttttttgctcatcttacctaatcttttgccttgattcaaatctagcattacatctggaagggactatgatacagtataagggataagcaatttctgtgtatgtaacatattattctattacattaggaaactaataagctgagtgaagtaccatttccctctcagttttctggggaaatgagcattataagatacactttctatctttcaaagcgttaaaaaaaacaagttggccaggtgtggtggctcatgtctgtaatcccagcactttgggaggccgaggcaggcagatcatgagatcaagagatcgagaccatcctggccaacatggtgaaatctcatctccactaaaaatacaaaaattagccgagcatggtgttgtactcctgtaatcccagctactcgggaggctgaggcaggagaatcgcttgaacctgggaggcggaggttgcagtaagctgagatggcgccactgcactccagcctggtgacagagtgagactccatctcaaaaaagaaaaaaaaaaaaaaaaaaaaaaaaaatatatatatatatatatatatatacatgaaagtttgcttctcatctggcccattgaggcatgttccacaagggactctgaacatagcagtgtgatagcttactatttgtgtccccagcatccagcagtatgtttggcctacagtaaacttttaataaatatcgttctacagaatgaaagtgaaagccatgtgccctccctgaaggagaggagagccatttccctccctccccaagccccgcaccctcattatacttcctattccttggccaccagaaacatagcttgcctggatggctttggcagcacagcagaaagcatagtgggcaggggctgtaagtgctacagagacacttgacaggtgccaacttgggccacgggtgaggcgaggacatatttaggtctgtttaagcctaaaaaagctctaaaagaaaatgttctcttccatctttttaccagcataaatttgaagaggaagtgcttctgtggttttattggccatttttccctttcagacttggcaatttcattcaatttccagttcacacttctcaatttcaatcaagagttttatttaaaatatatccagtttactgaaaaaaaaaatgacactatttgggatgggctgtgatcactactatttttatcagcatcatctattcagaaaatggaagcaggaaatccaaattttttaaatgatttctgaaagtattttatgaattgcaaagaagtgtagaaggaagagaaagtgtttactttacatgctctttcaaagtttcaactttccttagctgcttatggaaactgcattactacagactttccattaattgtagattagaccagactaattcaataaatgtttaaaaaatggaccctgagtgcaggttcagacgtccagaggaaatgacttgatggtacggaggtggaagggagtgagaagttatgatgatgtatggtgctgttgatcagttaattgaaggtaaaatttttagcttcaccaagcaattacctgatctcattaaggtctttaaaatcacctaagtaccatttgcctgaggcagctgccccttgtttagatgttatttcaggcattaagaaaaacacaatgttaatggtgaccagggaatttatgcatgcagtttctagtatatattattctgaatcttagccattattcagtattatccaccttgtataaacatggggcactaaaatatatttacattttgtatatatttacatttcatatttgttttacttttcaaatgtattttaaagcatcatgtttacaagatagttttttttacaaataaaatttgttaagagatatggattgtcaatttttttcaagaaactacttattaaagtataatatatatattttaaaagctcacaaatcataggcgtacagcttacaacatgactacactatgtaactggaatccatatcttgaaatagaacattaccagatcccaaggagctctctttatgccccctctagttcactatccccaaccccactccaagggactccactaacctgattccaaatggcatagattcatttgccaatttttgaactttatgaaagtaaaatcccacagtattttctcttttatctcccattcctcctccattcctttagttttcaggttttgttttgttttgttttgtttttggagacggagtcttgctctgtcacccaggctggagtgcagtggcgtgatctgggctcactgcaacctccgcctcccaggttcaagcagttctcttgtctcagcctcccgagtagctgggattacaggcgtctgccaccacacctggcaaatttttgtatttttagtagagatggagtttcaccatgttgggcaggctggtctcgaagtcctgacctcaagtggtctacctgcctcagcctcccaaagtgctgggattacaggagtaagccaccgtgcccggctgcccattcctttagttttttttgctggtaaattcatccacgttatggtgtgatgttgtttgtttatcctcagtgctgcaaagtggtccattgtatgaattttcatgttagtttaaataatgcatctaaatataaaaactgtgccataaaatttacatttgaaaatgacactgctcacattttactggactccaagactcctaggtggagagaaagaaagacagcagaaagagcaggagcatcaggctgtcaagaaacaaatcactgcaacctttcacatatcagaagggctgggaatatcagtaaccaatatctcacttatttttcccactcaggtgggttaaatgaaaaaaatcaccgaggccgggtgcggttgcttatgcctgtgatcccagcactttgggaggctgaagcagttggatcacttgaggtcaggagttcgagaccagcctggccaacatggtgacacccatctctactaaaactaccaaacaacaacaacaataacaacaacaacaaaacccctaaaaattagctaggcatggtggcaggtacctgtaatcccagctactcgggaggctgaggcaggagaattgcttgaacctggagggcagaggttgcagtgaactgagatcatgccactgcactccagcctgggcaacaaagcaagaatccatctccaaaaagaaaaaaacaatttctaaagacaacttcaattctggacataggtctccctgtagttacagtattttatttcagtagttttaggaatttagtttgcattctattccactttcattttcctgttactttgatgtttaaaattataaagctgctatgggatgatgtgctggattttatgtctagatttgctgttaagtagcaatgtgactctggagatatcaattacctctctgtttcctcatcataaaatgaggctcttggaccaggtgatttttttttttttttatttttttttatttgagatggagtctcactctgtcacccagtctggagtgtagtggcgcgatctcggctcactgcaacctccacctcccgggttcaagagattctcctgcctcagcctccggagtagctgggattacaggcacgcaccaccgcacctggctaatatttgtattttttagcagagatgaggtttcaccatgttggccaggctggtctcaaactcctgacctcagatgatccacctgccttggcctcccaagtgctgggattacaggcgtgagccaccgcgcccagcctaggtcatttttaatgttgcacttaacactaagacgctatgtttttctgttctatatctttctaagcaacatattcacccctaaacttcagtggctatgtgttttaggtgttgagaggaatgaagaatcttttatttcaccggtcttctggtgttcactccctgagcaggacttgtcttatacttaagctcagttctaaggttaaatcaaggctcagtctctatcaaagcctataaaagctcaccctagggaagtgttcttagggaagcatttctaatatttccagctgtccatatattttcaaacaaataatagggtattgaagtaaactcgaatgttgattatacgttttctatcaaattattcaagtattcattcagaaaatatttattgagcacctacaatgtggcacgtggaagcactggggatataaatttgcataaggctcagtaggatgactttgaagaccagagaaaacatccttttaatttccaacattcaaggatgaacctattttcaccctaagcataattataattttgcttgctatataataattccatgctgtttaagttcttgagtttgtcttgcaaaagcttttgccaaacaacccatagcaaaatatttaataacacatgggcattccaaagtcataaataagaaactaagtggacctccttttagagcatgtccccacaaatgccctcttctctcctcatttccatcctggggtgaatgcccacttcacctcccacacagtgtggtttaaataactataaaatgtctccaacagatggtattacctggcatcccacacccaggactgtcatctctccctcaacatttccttcctgtggcattgaggctgtgaatctgcccatctcccctggttttctccaggtaactccaccttgggcaaggtctgcattatatatatatctatatttacatgtataaaagtatatgtatatgtatttttagaggcaaggtctcgctctgtcacccaggctggagtacagtggcataatcatagctcactgcagcctccaactcttgggtgcaagggatccttccacctcaggcccacaagtagctgggactataggtgcatgctaccacacttggctaattaaaaaaaaaaaatttatagaggtaagatctctatgttgtccaggctggtctcgaactcccgtcctcaagcaatcctcctgccttggcctcccaaaatgcttgggattacaagcatgagctaccctttgggcacataatgtattattaggtagagatggcaaaatttcttaattctcttgttgggttaatgttgttttgttgttataaaatttctaaaatgagaatgttttgcctccatttcagtttaattccttctagagtatattcatagaaaatgaatcattgagccaaagggatgaatatttgataaatattgtgaaatacttcctgggaaagttttgtcaatttatatcagtggagaacaaggatcatttctccatatcttcaccaatggaagtgctgtttttctaatctttcttaattatttaggagaagaatagtatgctgtattttaattttacatttcattcctttcattattcccaaagttgaattttaaaaatatgctggccaggtgctgtggctcacgcctgaaatcccagcactttgggaggccgaggcgggaggatcacgaggtcaggagatccagaccatcctggctaacacagtgaaaccctatctctactaaaaatacaaaaaattagccaggtgtggtggcacgtggctgtagtcccaactacttcggaggctgagggaggagaatcacttgaacccgggaggtggaggttgcagtgagccaagatcacgccacttcactccagcctgggcaacagaacgagattctgtctcaaaaataaatttaaaaaaatgctaaccttttatttctttttctatttgaattcttttattttttattatttttattattttttgagacagttcagtctgttgcccagactggagtgcagtggtgccatctcggctcactgcaacctccacctcccgggttcaactgattctcctgcctcagtctcccaagtagctggaaccacaggtgtacacccccatgcccggctaattttttgtatttttagtagagatggggtttcaccattttggtcaggctggtctcaaactcctgacctcaggtgatccacccgcctctgcctcccaaagtgctgagattacaggcgggagccaccatgcccagctgatttatttgaattctttatgttggaagatataagctttttgccttatttattgcaaaaatgtttctcagttatttaaaaagatatttaggaaaatggaacatttttgtgtagtcaaatgtaacaatatctcttttatgatttctttcttttctcgtaagcttagaaagattccctcattcagaaagcaaatgaacatccacatacattaaacaaaaaccctccccctaaaactctttcatctctcccccacccctcattattttacatttaatgcttaatctacctgaaatttattttgctccacaatatcaggtgaagaactaaaataaaaaattacccctaaatacctaactaagtgttccattcatgcaataatcattcctttttgcccttttcctggattaaatgtctaaaaacaccttggtttctggactaattgcaatgttctttcaattttgtttttgtattttgtatatctgtggctgggcttaaggactagaatttgttttctgtagcagaaggatgagagcttctgttcattcttacatataatcagatttctccttcttcgaaggttgagttggcttttgaaacaaacaacagctagctttctcatcagagtctaccatatctgggttttcctatgcatgacttttttttttttttttttttttttttttgtgagactgagcctctctttgttgcccaggctggagtgcagtggcgtcatctcggcttactgcaacctccgtctcccggattcaagtgattctcctgtctcagcctaccgagtagctgggattacaggcgcctgccaccacgcccggctaatttttgtatttttagtagagatgcggtttcaccatattggtcaggctggtctcaaactcctgacctcaggtgatccactcgcctcagcctcctagagtgctgggattacaggcgtgagccaccgtgcctggccttctgttcatgactcttgcactgcagatgaaagtgctctcagaacctacagagcaccaaactcaagaaacagaacttaggaagctttatgtgcatcattggctgaatcctctgcatggaggagcaagtgccctgcctgctagtccatttctattttaaattatagtgtaccactccagtggtgtattagaaaaagtctttagatggccaggcacagtgactcatacctgtaataccagcactttgggaggccaaggcaggcagatcacctgaagtagggagttcgagaccagcctgaccaacacggagaaaccacgtctctactaaaaatacaaaattagccgggcatggtggcgcatgcctgtaatcccagctactcgggaggctgaggcaggagaatcacttgaacctgcgaggtggaggttgcagtgagccgagatcgtgccattgcactccagcctgggtgacagagcgagactccatctcaaagaaaaaaaaagaaagaaagaaagaaagaaaaagtctttagatttaaaaaatagctaacacttactggagacttatattttttgcatttttttcaaatctttatgaatgtcttcagtaaagttaaatattttctttatttaatacatactcattaaaaattttcaagtttattgaggtgaaatataacataaaattagccattttaaagtgaacaattcagtggcatttagtacattcaaaatgttgtgcaaacaccacctttatttgttccaaaagattttcttttcttttccttttttttttttttttgatttagcttttgttgctcaggctggagtgcagtggtgtgatcttggctcactgcaacctccacctgctgggttcaagcgattctcctgccttagcctcctgaatagctgggattacaggcaagtgccaccacacctggctaaggttttgtatttttggtagagatggggtttcaccatgttggccaggatggtctcgaactcctgacctcaggtgatctacctgcctcggcctcccaaagttcagggattacaggcgggagccaccatgcccggcctgttccaaaacattatcatctttccaaaataaaactctgtatccattaagcagtcactccccattctctcttctccccattttctggcaaccaccaatctgctttctggatgggtttacttattctaaatatttcacacaaatggaataatacaatatgtgatctttcgtgtcttatttataaaacattagcataacgtgtttgaggctcatccaccttgtagcatgtatcagtacttcattcctttttatggctggacaatatttcattgtataaataaaacacagtttatttatccatttgttagttgatggacatttgggttgtttccaccttttggcaattgtgagtagtgctgctatgaacatgtgtgtccaagtacttatttgagtatctattttcaattacttgggatatatgcctaggagtgaaattgctgggccatatgacaattgtatatttaactttttgaggaaattctaaaccattttccatcatcactgtgccattttacattcccaccagcaatgtttgaggattccagtttctccgtccttaccaatacttgtccttttatagaaaaattataggcaagctcatgggtatgaagtggtatatcattgtggttttgatttgcatttctctaatgactaatgatgttgggcaccttttatatgcctatttgcatttgtataccttctttgcttttttattttttatttttgagtagtcaagtgcagtagtgagaagggggaaagagtagaacaaggagttcgatctataactgactgaacaatcaactgagataactcactatgttcagaccagcctgtataccttctttggagaaatgtcttttcaaattctttactcatttaaaaattgtgttgtttgtcttttttgttgttgagttgtaggagtttgttacatattctggatactaaacgattatcagatatatgatttgcaaatatttttttcccattctgtaggttgtcttttcactttttaaaaattgatacacaacaattgtacttatttagagggtacacatgatattttgatatgtgcatacaatgtgtaatgatcaaatcagggtaactggaacatccatcacctcaaacatttatcatttctttttgttgagaacattccacatcttctagctactttgaaatatacaataaattattgataaccattctttcacttttttgataatgtccttttttgcatagaagtttttaattttgatgaagttccatttctcaatttttcttttgttgctcaagcttttggtgtcatagttaagaatcaattgtcaaatccaaggtcataaagatttaatcctatgatctcttcaaagagatttattattttagctcttatatttgagttgttgattcattttgagttactttttggatatggtatgaggcagcttcattctttttttttttaatgtttttttttttttttgagacagagtctcactctgttgcccaggctagagtacagtggcgtgatctcggctcactgcaacctcggcctcctgggttcaagcaactctcctgcctcagcctcccaagtagctgggattacaggcatctgccaccaggcctggcaaatttttgtatttttagtagacacaggtttcaccatgttggccaggctggtcttgaactcctgacctcaagtgatccacccacctcggcctcccaaagtgctgggattacaggcgtgagccatcatgcccgcccaaagcttcattgttttgcaagccgatatccaattgtcctagtaccacttatagagattatgcttttcccattgaatggttttagcaccctgctgaagatcaattaactatagacatatgggtttatttctgtactttctttttttttattttaattttttttgaaatggagtctcactctgttgcctaggctggagtgcagtgacgtgatctcagctcactgcaacctccgcctcctggcttcaagggattttcatgcctagcttcccaagtagctgagaccacaggtacacgccaccacgcccagataatttttgtgtttgtggttttttttttttttttttgagacagggtcttgctctgtcacccaggctggagtgcagtggtgcgatcttggctcactgcaagctccacctcccgggttcatgccattctcctgcctcagcctcctgagtagctgggactacaggtgcccgccaccatgccccactaattattttgtattttttagtagagacggggtttcactgtgttagccaggatggtctcgatctcctgacctcaggtcatctgcccgcctcagcctcccaaagttctgggattgcaggcgtgagccatcgcgccaggccctgagcttattttcttaagaattacatactgtctctgtcaaagaggagagataattggtgcttaatacattgtttactttaggtttacaaaaggttagataaacaaaaagactaaaaatctgtttgtactagtgaacatttctgaattggtaacccacagttaggttgatagatatactgaaagcaatttttcttgttcacatgtagtacttaatttttgtcaagtttgtgactgctcagttttgcatcctcctttgtcttcctcttttcatgaccttatttcttcagatggatgttttgaggttattttctattttgagaaaactatacaaatctgatttattatcacaatagctcaaaagtagttcctgttgaagttctccacattgtcaatactgtgacctcctgtcagtctcctacactggatgggaaactcaagctgagatttctccaaagtgcttcccacagcggctgaactaatttcaattaccaccagtggtatacaggcgttcccttttctccacagcctcgccagcatctgatgttttttgactttttaataatagctgttctgactagtgtgagatggtatctcgctgtggttttgatttgcatttctctgatgactagtgatgttgagcattttttcatatatttgttgcctgcttgtgtgtcttcttttgagaagtgtctgcttatgtcttttgtccactttttaatgtggttatttgttttttgcctgttgcattatttaagtttcttataattttggatattagacctttgtctgatgcagtttctgagtattttctctcccattctgtaggttgtctatttactctgttgatagtttcttttgtgtgcacaggctctttagtttaattaggttccatttgtcaatttttgtttttgttgcaattgcttttgaggacttagtcataaattctttcccaaggccaatgttcagaatgatgttttcgagattttcttctaggatttttataatttgaggtctaacatttaaatcttttaatccatctcgagttaatttttatgtatggtaagagggaaggatccagtttcgttcttctgcatatggatagccagctatcccagcaccagttattgaataggggagtcctttccccattgcttatttttgttgactttgctgaagattagatggctgtaggtttgtggtgtcatgccttttgaaggtttttttttttaatttttcacttagcacaatgcatttgaggtttatctgtgttcatatgcttattaatagtccctttgtttctgagtagtattccatagtatggatgtagctcagtttgtttatttatttgctacttgaagaacatttgaattgtttccagttggtgattacaaataaagcagctataaacagttcacttaaatgtatttgtgtaaacatatgttctcatttctcttgggtcggtatctaggaataggattcctgaattataggataaatgaaggtttaatttaataagaaaccgccaaacattttcagttttgtagagccaccataatgaattaccatggtcttagtggcttaaaacaatagaattttattgccttatagttctgtgaggctcgaagtccaaattcaaaatgttggccagcccatactccctctgaaagctctaggagagaattcttccttccttttttttttcctgagacagacccgctctattgcctaggctggagtacagtggggcaatctcagctcactgcagcctctttctgctgggttccagcaatactcctgccccaggctgccaagtagctgggattacaggtgcccaccaccttgcccagctaatttttgtctttttagtagagacagcatttcactgtgttggccaggctggtctcaaacttctgaccttaacctgaccttaagtgatctgcccgccttggcctcccaaagtactgggatctttggggtatcgattttcttcctgtaaacctttgtggccggtggcacctttgcctgacttcttgtgtccaggaagaatgaggtacacagacaagtgaaaggtgaagaagtcaaaggggagctttatttagtgttagcacagctcagaggagacccacagtgggtagctcctctctgtaggcaggttgtcccatggagtgttcagctctcagcagagacgaggccctggagagggtagctcctctccacaggcgggttgttaagagcatctctgctctcagcagagagggtagctcttctctgcagctagtcttgccattgtctctccatcctctgccctcttcttgctgatcccagggctcagaggggaggaagtatgtgttgattggtccatgggcagccataggtgacctggaggaggcacaagtccccactccagtctgcgggactggcagcccagcccccagccttcaggccctctctggcctgaaggtgtggccttactggaacctgctcccttccctccaggaatctgtctgccttctgctgccattcatgaccccggggctcagccccaaccctgcttggagattggagcaggcactgggagaggagaggccaggcaatgggagcagacaaccccaggcctgcaggtatgtttggggaggggccttcttgggcccccgcgggtgcaggctgcagagatgcctgggtcctgtgcctgggagggcagctgcagctgcactctgggagctaccacccctccaacttggaagcctcttcctctgcttgtccctggctcctgcctgctctgtggagcaggaggcccaggtctacagctgcaggtccaggggctgcagttgcacccaggagggcagatcctgcctgctcctggccaccctcaagagtgaggggaggcttgcgtccacagctgcagtttgggtgcccgtatccccacccaggggggcagggcccctgcctgctcagtagagcaggaggcctgggtctgtggccatggtcagctgccgtcattgggatgacagtcatgagccactagcctgacccttccttcctcttctcaccttctggtagctcctgcaaactttggaattccttggtttgtaactgtgttactcaatctctgcctttatctgcacatggccttctctcctgtgtctttctgtgtttttccctttttttttttttttttttgagaccgagtcttgctctgtcgcccaggttggagtgcagtggctcagtctcggctcactgcaagctccgcctcccgggttcacgccattctcctgcctcagcctctgagtagctgggactacaggtgcctgccactgcgcctggctaattttttgtatttttagtagagacggggtttcaccgtggtcttgatctcctgacttggtgatttgcctgcctcggcctcccaaagtgctgggattacaggcgtgagcgaccggttttttcctttaaggacactagtcattaggtttagagcccacccttatcaagtatgatcttactttaactaattatatctgcaaagactctattttcaagtaaggtcacatttttaggttcaggatggacatgaattttggggggaacacttattcagcccaccctggtggctgtaccatgtcgcattccctctagcaatgcctgagagttatagttgttcccaatcctcacaacttcaggcttagcaactttaggagatagaatagtttcatgagaagtctcaggactgtctctcattgggctgccttggcatacatgcgtgttcatccttgaacttatcgctacagcccagacatggaacatgatggttggccaggatgtggtcatatccctactcctaaaggtagggatggggaggggtcagtgccacatgaatcacgtaaattgattgtggataaggggcttcctggaagaaaactagggagatgttaacagaagaagaggaactgaaagattgtcaggtaaaaacaactaatttcctctacaaataggaaagtgccttttgcaaccgctccttatcagtttccaacaactgctggaatcaaagcaattgattgttttctatgtgccaggcactatgccacgtgttttacatggctccaagttccccagcattcctctggggaagattccattactctcaccttttttttttcttttttttttttgaggtggagtctcgctctgtcacccaggctggagtgcagtggcatgatttctgctcaccgcaacctccacctcccaggttcaagcgattctcctgcctcagcctcctgagcagctggtattacaggcgtctgccatcatgcccagctaacttttgtatttttagtagagacagggtttcaccatgttggccaggctggtcttgaacgcctgacttgaagtgaccgccgacctcggcctcccaaagtgctgggattacaggcatgatccaacgtggccggctcaccctttttacatgtaggaaactaagacttggagactttggataacattgcaaaagtcatgtagctattagggggtgaccctggatcctgggccaggtctgctaacatcagtgcccactatactgtccttgtatttctccccagtctcccaaccagccagtctgtccctgtctaccttgatttgaccctttcattgacatgcataatttcttggagtggtaactttttttttttttttttttttttaacatttcagggcttctcctagggataacctctgcttcctgctgagttctggatctagagcacaggcaggtttcctcccctttctcctgtagctactgaactctgactttgtagtggtggagtgtctggggcccaagagagatttctgtccttcacctggcaatagtagaccgctaatttatatcagagtgtgtttcttgcccctcccccaggggcagacaggcactaccttgtcctcagacaaggctcaaagcatgaatgggcttccctaggtatgcctgctccaccctaaaaccttggcaggtgctgtagggctgtaccaccaagggggaagggtctcccaggcctactgtgctgtttccagtctttctcatgcatgccgagtagaggccagtggaaaaggatggcaagcagatggggatttctctgtgtccagcgtgctcagggcttctaaactgccatgctagcttatcctttgccggtaagaatttgttttcttcttatccagttttctgatgattgtctgttcttcccattctctgccaaaagaggaaacagctggtgtgtcttgtccctttttggaaggacttgtgagccttaggaattcagttcccttgattgctttgtataacagcgcaattcgctgatggactaaaacaaaattatggttttgtatgtcttataggttatccattttttaatgtatttatttgacacattgcggggtttttttttgttttgtttttgagacagagtctcactcactctgttacccaggctggtgcacagtggcacaatcttggctcactgcaaccaacctctgcctcccgggttcaagcgattctccttcctcagcctcccgagtagctgtgattataggtgcccgccactatgcccagataatttttgtatttttagtagagatggggttttgccatgttggccatgctggtctcgagctccctcctgaccttaggtgatctgcccgctttggcctctcaaagtgctgggattacaggcgtgagccaccgcgcccggctggttatccatttttctcttgtgtatgccagcctcacagagtgtgggatatgagaaagaaaggatcctagggtcgaataaacttgagaaatttgtcatgtcttatcctcttctggatatttacatggcacattcatatcttaaagaccctgagaattcctgcaaaatagagaaatacatatatattgagatggagtcttgctcttgttgcccaggctggagtgcaatggcacaatctcggctcactgcaacctccgcctcccaggttcaagcaattctcctgcctcagcctgtcaagtagctgagattacaggcgtgcaccaccacacctggctaattttgtagttttagtagagacggggtttcaccatgttggtcagggttgtctcaaactcctgaccttaggcaatccaccagcctcggccacccaaagtgttgagattgcaggcatgagccaccacacttggccttgagaaataaatttaactttgtttaacaaagtgtccctaaagtttgtttgatcatagaaccctttgcttgtgtagcactcattatttcccttagaattaatattctgtgaacaccgttcggaaaatagaggctggatgttgatgttttattgtctgggaacctggaaccaaaatagaaagccaggatccgtaaagatagtaacagaattgttgtgggtatttctagaaccaaaagccatcctggagattgggtggaggttctgggtgataccgaggcactcagcaacggccttggtcagtagtccgtgtttcatcttgtatgctataacttcagagatggccgggtgtggtcactcactcctgtaatcccagtgctttgggaggccgaggcgggtggatcacttgtggtcaggagtttgagaccagcctgaccaacatagcaaaacctcgtctctactaaaaatccaaaaattagctgggcgtggtggcaggcacctgtaatcccagctacttgggaggctgaggcaggagaattgcttgaacccgggaggcagaagttgcagtgagcagagattgcaccactgcactccagcctggacaacagagtgagattctatctcaaaacacaaacaaaaacaaaaacaacaaaagacttcagaaaggatacctggatgaatgagacacaaagtcaaaataaaatgtctggaagtctctagatcattccatggactctcctttctgacacacccatctcactctctgaaaccaataagaaatctcttcctggcccctgtgtttatatggcttgctccgatggctggtgctcaccaaccctgctgtggttggggcagaccctgaatatggagctgctatgatatagtagggctggatgccaacctgttttgtggatcttcatcctagttgtaaatgatttctcagcctcaaattaaaactccttggcttctgggccctggtctaccccagggatttgagagtgggcatttggtctctctgctctgtgcccctcagttccatcaccatcccttgaagtagcctagacacctgttgttttcagctccttgcaccctttttatttttgctcatgggacaccacctctctcctccatcccatattcaggtgggtctgcccgtccataattgctggtagggaccaaagctggggttcaaacccaaagggtctgattccaaaacccactttcataaaaattactctagcttgcttcttggtaccaaattacattgcttttcattgcatttaatttttaatactctagatcgtgaaatacactacagagtttctctccagtcatttggataaccacatgtcagacaatatctgagtcaaggtttaaaattacagaaaataaaccaaagttctcatctcacaacagggaaaagtatcatcttactagttttaatggtggcaaaaaattaaggttctgtttgaaaaattattttttctctaagatccttagtcctttttattcctcaactacatcagctaaaatgtggccatgtatgatgattatggaagtgaagagctttttctgaaggatactaacctaattactctggaaatatcaaccatgaatcaagaagtatattatgacttaattgttcattgcacaaaatttagataatcactcatttcttccatgccttccctctctccatctagaagcgtatttaactaagtaatcaggggtactaactattcacagcctaggcaagtgtagggaaataaccaccttaataacacattggcagcctcagaaatggctggctatgaataagcacatagcacttagtctgctccttcttatgtgtttgccaatacatttgcaatttcatgcacagttttaaatgttaagcattaatctgaaatgggcactgaagcatcagtaaagtctacaatttgccccctttaatgaaaatgctagatatagatttaatgcaaaactaaacatttggctcaatatgttctactccagtaaattagctagtgtttgtcatctttttaaaaaaacaggggctgaatgcctcatttcacatggttttgttagggacagatagaaagctgataaacaacccatttgttctatgacagtagctcctcgtcacactactgaagttaagcttcagtgctcatttcctttacaaatcctgttgtgagtttaagtggcctgctgttgaatatttgactgaagtgtagccttgacaagagtgttttcccagaggaatacagacgaagcttttttggacagtggccctagagcagtggattctgaaatgactcagtgaacctgaaagggaacagagcatcagggagccctactgtgcgctatttgaaactgtcagagatgttatcccacaacagcctgaacaggttcatgtaattgccctctacttggccagatgaggaaaccgagggctagagatgaagctgtgtagctaggaagtgatgaaacctggatttgaccccactcactatttcacactgtctggcagctgggagctgcccttcctatatctctaccagtggtgcattatttgtcattcaaggagcttacacatgccacctcctccaggaagtcattgctgattgctcactattaaccatccttcttatgtgtttttattgtactttatctgtttccaatgtagtccttaggacattctgccttttggtacattaatttaatacctatctgactctttataagagaaagggctatctcttacattgaccttgtatatactgcaggactttcactatcaaaggcactcgataaatgttcattgaggctgggcatggtggctcacactcctaatcccagtacttacagtggccaaggtggaaggatcacttgaggccaggagtttgagaccagcctgtgaaacatagcaagatctcatctctgcaaaaaaaaattttttttgagacagagtctctctgtggccaggctggagtgcagtggtgcaatctcagctcaccgcaacctctgcctcccaggttcaagtgattctcctgcctcagcctcccaagtagctgagactacaagctcgtgccaccacgcccggctaatttttctatttttagtagagacagggtttcaccatgttggccaggatggtctcgatctcctgacctcgtgatccacccgcctcagcctctcaaagtgctaggcttacaggcatgagccactgcacccagccaaaactttttttaaaaaaattagccaggcgtggtggggggcaccagtagtctgagctactcaggaggctgaggtgggaggatcgcttgagtccaggaggttgaggctgtagtgagctatgattgcaccactgcactccagcctgggcgacagagtgagacctgtctccaaaaagagttaaaaaactgttcattgaaatgtttataaaataggtggttctcaatatctcatatcctatttccagaattatgaagaacagtacagtcaagggggcaggtcttgcagtaagcctgacggggtttgaatcctagctgtatgaccttaggagagttgcagagcttctctgagtttcagattccttccgttataaagcaaggataggaatagtatctactgcaaaaggttgttgcagaagtccaataagagaaggcacacatagtgcttagaatagtgcctggtacatagaaaatgctcactgaaccttggctattattttccagaaatgtttggagatttttatagcataggcaagaaactttgtggcactggttgtttaccattttaaaacgtaaaaaaaaaggaaatatttgatttgattaatagctgaactgacaacgtgcaagaaccatttaataatgaccaatcatgaaaggttatggaaaaagaaatgatttaagaaggccaagagccaggccaaggtattggtaagccctgaactcatcacatgtctggagtcgacagttcaatcagttctagttttgaatatgggcaggagctttttgtaaaaaaaaagttttggggcaatatgcatatggctttcttttctttctttctcttttcctgccccctgggcaatatgtgtactgctttctgagaatgagtttccaaataattgtgtacctactgatgcaggtgtcataatttccaaacccatccaatcaatatgtaccagacagagatctgctcacagttcagagagctaatttggtaactccagtgggccattctgttccttgttctggataaccaactaactaacctactgcctattgaacactatttgacttgggtaagcccctcaacatccctttgagcttgaatcttcttacagataaatatggatcaaaatatggatacctctccttcctttccctctttggacctcagtttctcatctgtaaaatgaccaggtggcctcttagtccctcctctggctaaccttccatggttctgcctcccggggatgctgtaaagtcagttcaatgatactgactaaactgctgtgaacttcctgacccagggcccagctggacaccaactgactaggagagttgatggctacacagggaagaactgcctctcctcagctgccggacagggaaaggaggggtggggcagctgctgatggctatgtcttcccctgtgtcctggtcacctggcctctgcttgcatgcaacaactctatttttgaacaggaggtgggtggcaggagggcccagaggtctgaattttcttaaacagccaggcatccttgggctgacacggtgtcctagctctcatcaaaggacatgatgaatatatataaagcgaagctacatgagcagcccactgtgaagggaggagaagggcaggaggtcttgaagcctagattctttggctccaggtggctggaaaagtcaatagctctagacagtttcccaagccggctgcgcaccagcagcacttggaaaggtagtttgaagtacagatttgtgggctgtagcttagaacactctgattcagtaggtgaatggcctgagcatcttatttttagcaaactccccaggtggttctcgtgcacagcgaggcttgggaatccctttggtttaggtcatggggagatagaagtgataagagaagaatggctggtgaagcacatcagctccacccatgctccagtggggtcagtagtatgtggcatcccagctcattccagctgtgccatggttgtgtcttaaaatctcaaagcctcgatgcttatttctaaaatgggaatcatactgacaaccccatagtatcaatgtgagggtgaaatggatgatgcccataaggcacttagcagggggcctggcacagagtgagcattgaataaatgtcagttattgtcattattgttgttgttaacattattatggagggccaggtgcggtggttcccacttgtaatcgcagcactttgggaggttgaggtgcaagaattgcttgaggccaggagttcgagaccagcctgggcaacataacaagatcctttttctacacacacacacacacacacacacacacacacacacacacacacacacacctacctgaaaaaattagccaggtgtggtggtgcatgcctttagtcctagctactcagggggctgaggagagagaatcacttgaactcaggagttggaggttgcagtgagctatgattgtgccactgcactccagcctgggcaacagggtgagacctcatctcttaaaaaaaaaattaaaaagaaaagatttttaaattcttaagaaaaacccaaacaaaaaccattattaactaatgaagcacttggccattcctggctgttgttctcttccttattgtagggtgggtgtcttagtttgggctgctagaacaaatataacagactgggtacttaaacaacaagcatttctttcacacagttttggagactggaagtccaaggtcaaggtaccgacagatccagtgtctggagcgggcccactttctggttcatagatggctgtcttctcactgagtgctcacatggcagagagcagagagacacaagaagcaacctctcatgtctcttcttagaaaagcatgaatcccatttctgagggctctactctcatgatctaatcacctcccaaagcccctgcctcctaattccgtcacactgggggtaaagatttcagcatatgaattctgttcagtccgtaacagtgggatagccctggacaacatctaaggtcttgtttgctagatgatttgctccagagcccccaaggaactgcacttgtaacacattttacaaagatgactcatgaaagtagggctaaaaaatgttaatattattcaatctgggtgatgagtatttaactggctattaagatattccttcaatttccttgatatttgaaatatttcataacaacaacagcaacaataaactaagctaatattcataaatgccagctgattggttcatgttaatcccagctggtgtgaccttgatcaaaatgggtaagcaggcaaaatggccttcaggaccctccagctgtgtgactatactcccctctttgagacccctgtcagtccctcccaagttcttcagccacccaagacctcccttcctcaaggacctgttcttccagagctcctgatctcatcttggagctagtttgattggaggtattaacagttgatggtggcttaatttcgatttctgctttttctcataaaccaagtggcatacacgtcagacccctgcctgtgagtgatgaggacattttgatggagggtgaaagttgtacactaccctcgcaaactactaggtgtaaagctgctccctttttgcatggaaaggtcaactccatttcaacattataatgttcagtttctgttcagagcaattcagaatggtgccaaaacaactgctcaattcaggcttgtgtgtgtgtgtgtgtgtgtgtgtgtgtgtgtgtgtttaacctgtcagtttgttggttgaaaaaaaaagtgatgagttgcctttatgtaaacaaaatagccagttaattgactgggattttcactttttaaccagtcatcattgcaaagacaaagagaacttttgctaagttgcttttcacaatgtcacacagtcaaacaagcacacattcaaggtgagattttcctttagttactatccttctctggtgtgaatacctaacctgatatcaaatctttctcttcttccttcacagtcctccagatgtgctttgatttccttagtgtcttagttttctcctgaggagccacctctctctcttggatacctgcagcgctgcccaaacttcaatcattcccatatggctctcctggtttttgccatatccatgtaccacccttcctatcattgaaccagctttctttacataaaatcacttagaaaataagtttatttttgccaggcacggtggctcacgcctgtaatcccagcactttgggaagccgaggccgttggatcacctgaagtcaggagtttgagaccagactgaccaacatggtgaagccccatctctattaaaaatacaaaattagccgggcatgatggtacatgcccgtaatcccagctacttgggggactgaggcaggagaatcgcttgaacccaggagggagaggttgcagtgagccaagatcgcgccattgcactccagcctgggtgacaagagcgaaattccatcttgaaaaacaaacaaaaaaaagaaaagaaattcatttttaaagagtacttaacattattaccataaatggaaaaccagtattaccatacatagagggtaaccataaaaattaacatagtgaaaacaaaaagcagtgttcctaaattctagctggattccctaataagaatcttgatctaagacctgctttctctttgttaataaaaaaataaaggggggccggtcacagtggctcacgcctgtaatcccagcactttgagaggctgaggtgggcgaatcacttgatgtcaggagttccagaccagcctggccaacatggcaaaaccccatctgtaccaaaaatacaaaaattacctcagcgtggtggtgcatgtctgtagtttcagctactcgggaggctgaggcaggggaatcacttgaacctgggaggcagaggttgcggtgagccgagatcatgccactgcactccagcctggatgacagagtgaaactctgtctcgggaaaaaaaaaaaaaaaaaaaaaaggagtctcaagtgttaaagtttaaaaacatatagcaccaaactcagatttttcctccttcatttaatccaagcaaccaaaaaagctaataacctctttaagtaattgttatttaatgcctacaatgatcccttatgctaaaagtagccacatcccactctttggagctctggatccttgcaaattgtcttccaatcagactacctgcttctattctggccttaataccttgaatgcccaagccacccactcccttgttagctttggagtcttgcattctttcccagcgtcttctacaagtctcttcaggcctttgtacctcacctcacttgccactcattcaggtccacatagatgctaattttgtgagcatttttcctaaaccctgcctcaaagacttccaaggaaggctgacagtgtgtcacttagcctctcagaggctccatttcctcatctgcaaatcaacgaagtctaatcattctggcctcacagactgttgcgaggattaaatgatccaatggagagaaagtgccttgcacaatggccgtaatacatgctcaataagcggcagcacgttgttagccatggagtcatccagtctgactccagtgtcaacttctttcagtcagttcttgaactacctcttagcccttgctacacacattcactggctcttacaaatgccaataagctgttggtttactcaaactcctggtcagtgatggttgattgtctggaatgccatgtgtgtttgcttggtgtatctcagacctggagtagctacggaagtcaaggagtcctgcaagggagtgtgattggatagcatgtcctactgttcccaccagagagattcatgtcttcgtggacagcttttgttatcctcccttagtggacgtaagtagagggacagtttttacaagggactgtggccatttgctctcaagaggctttggagtctcctcctgagtatgaggcactaagttcccatggtaagatcagtttctttgtacaagcctctccagcccgtctttgccttacacactagactcttgggaccggggctcatcctcttataaaaggatgccaagcagagggtcatacagtaaagggaggtaaacattcttttaaactagtttatcaattcaacacagcacagtggtgttgggttaccagggtcaacagccagcagtcacattcctcagctgttcgattggggcaatgcattaacaaacagccagggaaactctttttgattaattatgttgataagttttttttgtagtgtgctacaagctcttttaatttaatctgcttggacagcagcccattcaggtgaaatgtcttgacttatctaaagaagcactgatgagaaggctactgggcctgggattttactgtactatcatgtaatcattaacacatgtggctactgttttcctgcattttgattttcttcttgaaaggaaggacatgtctgtggggtgggggtattagggaagtaaggatgagacccagcagcagtgacaggaaaagaggatgctattactagctgagcctgaaaacactatctttattgccaggagtaaaagtatttgaaagcactaataatggcttcagtgaatactcatcttttaaaaaagagcaaaggatggcgaggacatagttctctcaaagagtggaagtcttctagattagggttgtccaatcttttcacttccctgggccatgatggaagaaaaattgtcttgggccacacataaaatacactcacagtaatgataggtgatgagctaaaaaaaaaaattgcaaaaaaacctcataatgttataagaaagtttatgaatttgcattgggctgcatttaaagccatcctgggccacgtgtggcacatgggccgcgagttggacaagcttgttctagatcaaggtttctcaaccttggaaatactggcactttgggctggataaggctctgttgtggggtgcctgtcctgtgcactgtaggatgtgtagccttttcccagtaggtgccagcagcacccctcacccccacaattgtgataaccaaaaagatctgtagacattgccaaatgtctcctggggcacaaaattgcccccagttgagaaccactgtcctggatgtacagattcaaatcttaagtagcctattatgactctctgctgatctcttttccatcacctcatttaagacacaattcaacacatagctcttccagggggcccatcctcactgacttctttgtcatctgtcctccctacattaagaccttgggtctatactatcttctccttccttctcttcttcctcttctcccttcttgttttttcatccacagaactctgttctgagcaactgttcaatatcaacttgtgaattaaccagggaattatttctcctttatgtttgtgacagacatctatctcagaggcaacccagacaaaatttcccaaattatccaaaaataaaatgaatattctctgattaaaaacagatgtctaggccgggcacagtggctcatgcctgtaatcccaacaccttgggaggctgaggggctggatcacctgaggtcaagagttcgagactagtctggccaacatggtgaaaccccgtctccactaataatacaaaaattagctgggtgtggtggtgggtgcctatagtcccagctactcaggaggctaagacaggagaattgcttgaacccgggaggcggagtttgcagtgagctgagatagagccactgcactgcagcctggtcaacagagctagactcagtctcaaaaacaaacaaacaaacaaacaacagaaaaaaaaaaacacagacatttaggccaggcacagtggcttgtgcctataatcccaacacattgggaggccaaggagggaggattgcttgaaacacagagttcaagaccagcctgggcaatgtagtgagaccctgtctctatgaaaaataagagagagagagggagagagaaagtaaaaaatacatgtctaaatgggggcagtttaaatttgaggtgagaagtggcaggaagaagtggcagaattacagaaattaaaaatagctcacactctgcaagcacttaatccactatatgccacatgcattatctcatttaattcacacattatccccattttgtagaggaggaaatagagttttagtgaagtgaagtaatttgtgcaagttcccagagtcgaactggcagtgtgaggatttgaacctgggcagcttgatcctggggtgggtcctcagcccctgttcacacagttaaagtcctaaaggggtggaaggtcaccaaataaggctgaggaccaagggcaggatgacttttcaggagctgtaagaacaacttgtctgaattctagaggccccagctttcagtgtctggacctatgcaaatctgcaagtgaatgtggtcctatttctttgtttccatctgtcttagtgaaactggccctgcttagcggtgtggagtattgctttcccagtttagaaagttaatttataaagacagctgaagtgaagaatatggttcaagagggtgcctcagctagcaggtgctgggggagtggggtgggggtggggaatatagggctggagaatcacgaaataaattaaatctttgacatttgatgactgtgggagaaaaacatgtgtggacatagatccaaagccttggcagtacctatcccttacctgtcctaagccccgttttttgctcattttgtatttctcatacgaaagcacaaagttgtagtttccaatttcttggtggcaaaattgtggcaaacattgaaaaatatttgaaaaagatttccctttgctcttctccttctccttctccctctccctcttcctctccttctccctccccctcccttcctcctcctcctcctcctcctcctcctcctcctcctcctcctcctcctcctcctcctccttcttcttcttcttcttcttcttcttcttcttcttcttcttcttcttcttcttcttcttcttcttcttctttcttcttcttcttcttctgtgtttgtttttttgagatggagtctcactctgttgccaggctggagtgcagtggctcggctcactgctgcaacctccgcctctgggttcaagagattctcctgcctcagcctcccaagtagcacagccatcatgtctggctaatttttgtattcttagtagagacggagttttgccatgttggccaggctggtcttgaactcctctcctcaagtgattcacctgcctcagcctcccaaagtgctgggattacaggcgtgagccaccatgcctggcctctagcctcctcttgagccaccttttcttcatactgtgttgcagccatactggcctttccactattcctgcctcaggacctttgcacatgatggttgctttacatgggtgctgactcctttgcccaggtaagctcctcaggtctttgtttacatatcacttcctcagagggccttcctgacttccttctctaaactgatttctttcttcactattctctcagcacttctttttttgggggaggcagggaacacagtctcactttgttgcccaggctggagtgcaatggtgtgaccttggctcgctgaaacctccaactcctgggttcaagggattctttgcctcagcctcccaagtagcacacgccatcatgcctagctaatttttgtattcttgtagagacggggtttcaccatgttggccaggctggtctcaaactcccgtcctcaagtgacctacctgccttagcctcccaaagtgctgggattacaggcgtgagccatgatgcctggccttctcagcacttcttttggagaattttccataacttaatgtttgtctcccaactacactataagttccctgagaacagggacttagcattccatatggcaatggcacacaatggcctggcacacagtgttttataaatatttgttgagggaatacatgaagtctagactgaatatttggttgatttggaagcagttgtgtgtttcctgccttttaactttaaaaatgtgtgaaaattttcaaatgtacataaaattagaataatacaacgagcttttatatacacatcacctagattcaccaattgtcaagattttgccacatttacatgattttttcccttttttaacttaaaattttccctagccttctaaaggcacagaaacattagctaccattcattgtgtttactatgtgccagtaaatgtgctacatgtttctttctttctttttctttctttctttctctttctttctttctttctctctctctctctctctctctttctttctttccttctttctttcttgagacagagtttcgctctgtcacccaggctggtgtgcagtggcgagatctcggctcactgcaacctctgcctgccaggttcaagtgattctcctgcctcagcctcctgggtagctggaattacaggtgcctgccaccatgcctggctaatttttttgtatttttagtagagacggggtttcgccatgttggccaggctggtctcgaactcctgacctctcggcctaccaaagtgctgggattactaggcatgagccaccactcctggcctaaatgtttcttacacatgttgttatttaatcttctcaacaactctgctgtgggtattataaccctattttagaaaggtggacgctgatacagtgtaagtcactttatgcagtgttcccactttagtaggtggaaatctgggactccaaagttcatgttctgaactatcaaacattgctctttatagatttaatcaaacacatttctctcccacctgccctttcttcttcatacctacagacttctaaatgtttgaaacatttttattgtgcctaacctgtagggcaagtgctctagtgcctgtgaaaaaagaacagcaattggctttattattctcctaataaaaaatcaatttggcaataaacatttattgaacccttttttatttatcaagcaccatgttaagagctggggagacaacagtgaatgaaataaatattgtctctactcttatggagcacagtagagtcaggttctccaacagtaattcagatagtttgtggttggatccaccctatataaacatcctcttggctttccaactgagaccataggtttacaatgagcaaagtaagatggagcagctgacgctgagggttcaaaatagtcacctccactatttagaggtttcttctctgacactcccctctacttttttccttgccctctgtttcctgactaccctggagcagtaccgctttcatctctgactggacaaaggaagggacaagatgtgtaattcaaaattactctgatagctacacaggtcttctgtgtacagttgtgcaatttgtgcactgcacaaagacatctggttgaagagctggctggagctgaaatcctgcttgtgccccatttgccaaggggtggccccacctggggctctaccagccttgaggaagggcctctttttctacctaccaagattcccatggtggacaccaggagccacgggtccatgagctacagaggcatcccatgaacttgaggaagccctcttggccaacctagaaagagaatggaaagggagatcattgaaacagctgggtcaaattgaaattttggattatgtgtgaaactcaccatttgtactctccatgtcgcccatggactcagtggatggaattcaaagtgccttcaggtttgatggcagtaagaatgccagttcaacacaggaaaaaggcatggtggttaaaagcatacactttatagggtacataatgtgacttgagagacttcttgccagcaagcaatagaagagaatggaagaattggtaacaattttcaggtggtttatttcctagacttaattcctagagctaagcagatcacctcatcataatgacgaagagaatactaacacctgcacagccctctccagcataaaccaagaggtttttcacagggagtacattcattgtttttctgattgtgtatagcaatattaatagctttcatttagtaagcacagatacgtgcaggacattgtactgagaatttcacctacattgctttattgaattctctttatatccccataaaggaggtatgattatgttttatgcatggggacactgacatttgagttactcaaggtcatataataaagaagtggtacagcagggcttgaacccttgccttttgacttcaaaacccacacctggccatgcgcagtggctcacatctgtaacctagcactttgggaggccaaggtgggtggatcacttgaggtcaagagttcgagaccagcctggccaacatggtgaaaccccatctgtactaaaaatacaaaaattagctgggcatggtggcaggcacctgtaatcccagctactcgggaggctgaggcaggagaatcgcttgaacccaggaggccaaggttcagtgagccaagattgcactgctgcactccagtctgggtgtcagagcaagactgtgtctcaaaaaaaaaagaaaaaagaaaaaagaaaaaaagaacaaaacccacacctggaaccaccacgcatgcctgttttgggggaacagtctgttctgttaggtctctatcctggcctgggggacctaccacacacatctcagacttctgttcaaacatatccaacttcctccaagttgggaccttttttagctttcttttcttgaatacccactgccttcatgcataactgatgaataggaatccttcttgggcagtgcagctaactggccactttttctcagtattatcacaattcacactcatgtcacaagccacaccccagccaaggtctttaacctctgccaacctcatggctcagtagaagcactgctataagtatattaaaaaactttgtaagggtttttctgccaacctcaatagctcagcagaaaactgacataagaaaatattttaaaaaccttataaggatttttctctttgacaatctccccacagctgtccataggagaggacagtaatcgaaaagacgtgtctttttgattaatgggatttggggggatcaaagagacttcagtttaacaggatgaaaaatgtctttcgtgggaagttggggcaggaggtgttggcactgagagatggtttttatggtcctaagatcacaggtatgatcaggtgttgacgataattattttttgttttgggttcaagtgagagaattggtacgcaattcttggctagcatggtattttctttcaccttttaaattgaagagtttatagtttttgtaagacaaagttaccaacctcatgataataataactcacatttgttttgtacttaccttataatgctttaagtagtttataaacattcttttatttaatcctcacaaccactttgtgaaggaggcatattcattattggcattttacagatgacaagatggagtctcacaaagggtatgaagttgtgactgtgtaagctgaacaagtgtagagagctaatgtacaatatgaaaactacagttaataataccgtattctatactggtgtttgccaaaagagaagattttaggtactttttttttttttttttttttttttttagacagggtcttcctctgtcactcaggctggagtgcagtggtgaaatctcagctcaccgcagccaagacttcctgggcttaaatgagcctcccacctcgacctcctaaagtgctgggtttacagacatgagccaccatgcctggcagattttgggtactcttaatacacacacaaacacacacacacacacacacacacacagagaaagagagagagagagagagagagagagagatctgggtgcagtggtacacgcctgtagtcccagcttcccagctacttgggaggctgaggtgggagaattgcttgagcccaggagttcaaggtaccactgcactccagcctgggtgacagagtgagaccctgtcttaaaaataataataataataaaataaaataaagaaaagtaaaaaatgtagctgtgaggtgatgggcatgttaatttgcttgactatggtaatcaccttggcatgtatatgtacctcaagataagtgtagcaaaacgtgttacacatcttaaatatgtacaatttaaaaacaagacagaggctcaggaaggagaaataactcgctcaaggtcacatagctagtaagtggcagagcctgagttcaaaactgagcagctgcctccaggttgggcttgtcaccactatttcatgtaccctctaaattcttgtggggaaatcagggtgcttattcaatccatgctgcatatagaggttgttagatggcgaatacttcttgtccattttttgtttcaaagatggggtttcccccaaatacccctggcctctgtctcacctttactcaccctctggggagatgagcgagttgcttgagtgcgagaagaaagggcaggcatggcctagtcttttaactacacatcttgttctgctcctccaggggcaggtcttcctagttgggtgaggttgggggaggccttcagagttctagtgctccagagtatgtgagtctgcctatctttggagtttaatgtgaggagacccttgaccctatataagccacagtttccaaatcagcttattaaaggggatatttgtcccctatttgattattctcttgtcttctttctctgttgatctagaactcagatggagaagagagtgttatgtatcctcactgcaccctctcccaagagctattgtggaaaataaagaaaaaaatgtgggtcgggtgcagtggctcacgcctgtaatcccagcactttgggaggccgaggcaggcggatcacctgaggtcagaagttcgagaccagcctggccaacatggtgaaaccccgtctccactaaaaatacaaaaattagtcaagcgtggtgataggcgcctgtaatcccagctactcgggaggctgaggcagagagttgcttgaacctgggaggtggaggttgcagtgagccaagattgcgtcactgcactccagcctgggtgacagagcgagactctgtcttaaaataaaaaaaaataaaaaagaaacaaagaaataaagaaatgtagttaagtatcaagacatcatatgaattaaagactcgatctaacatccaatgaattggctgggcacactggctcatgcctgtaatctcaatactttgggaggttgggcgggtagatggcttgagcccgggagttcaagaccagcctgcacaacatagagtgaccctgttctaccaaaaaacacaatatattagccgggtatgtggcatgcacctgtagtctcagctactcaagaggctgaggaggcaggtttgcttgagcctgggatgtcgaggctgcagtgagccaagatcacaccattgcacttcagcctgggctacagagcaagaccctatctcaaaacaaaaacaaaacaaaacaaaaaaacaaaaaacaaaaaaaaccaacaacaaaaaaaacccatccaatgaatccactgccttccttggcaattggttcatcaattgagttaaagaaggagaatatagcaggtacttggcttacatgatctcacttaactgctgtaacaatcaggtgagatgagatttattatctctgtctcatccataaggaaactgtatcttattcagtcaacaaatattgggtatagcccatagccagactttgttccaggaggctcaggaaggtcatgggaattgctcgagattgtatatggctggtcagtggaagaactaggatttgaactcaggtctgaccaatgacatgggttaggttttccttggagagatgggagagtgggaacaaataaaataatgacaataaacatattgagccctgactttataccagtatgaaactttataccactcagtgcttgtgaagcattacctcatcgagtctttgcatcatccttacaaagcaggtattgttatcctcattatacacgtgaggaacctgaggctcaatgatgttaaacagtaaatgggccggggcggtggctcacgcctataatcccagcactttgagaggccacggtgggtggatcacttgaactcaggagttcgagaccaccctggccaacatagtgaaaccctgtatctaccaaaaatacaaaaattagccaggtgtggtggtgcatgactatagtcccagctactcaggaggctgaggtgggaggattgcttgagactggaagctggaggttgcaatgagctgagattgcaccactgtactccagcctgggtgacagagtgagatcccatcttttttttttttttttttttttttttgagacagagtctctctctgtcacccagactggagtgcagtggcatgatctcagcttactacaacctacaacctccacctcccaggttcaagcaattcttctgcttcagcctcctgagtagctgggattacaggtgcctaccaccatgcctggctaatttttgtctttttttcagtagagacgaggtttcaccatattggcagattggtctcaaactcctgacctcaagtgatccgcccacctcagcctcccaaagtgctgggattataggcgtgagccaccgcccctggcccatttactgtttaacatctgggatcacaggtgtgagccaccatgcctggtcaaccccgtcttaaaaaaaaatcaaaacaaaacagtaaattgcaatccaggtcttctcattccaaaccattagccgatgtgtagtattgcctttgttttcctgcctttacaaaggtagttgggagacctagcctctgacatgacatcagaacaccttgaaacaatcaattaaaaagtgcagatcaatctggtgggtgtgcatggaggtgcccaagagtggggaaggaaggcagaggatgatgtatgtgggaaaaagggctggggagcagagtgaagtaatgaatattgggtaggttgaaccaggcttcatgggaggcattttcagccaggtttcagctgatatatgcttgatgacagcagagaaaaataacagggtaagtttgagaatcagggataatttttgaatggcatgactttgtacatggtaagtcagttgtaaaaaaacaaacaaagcaacagcagcaacagcaaaactccatctcctctgaaacggaggaattgccctgttgaagagatgggctgcatccaggtcctcagggttttgtttgggtgaatattcaaggcctgaaagaccctggatcttgtcatggctttctgttgttaattaactggggtgactatggggtcatttaatatccttatctctaaaatgaatgttgagtcctccaaagttccatctagtgataatatttattctcctttcttgcaaggcagagagaggacagtaccagcctctggcacacagatgatggctgagaaatgcttgttggctgggtgtggtggtgcaaacctgtaatcccagcactttgggaggtcaaggtaggcaagttgcttgagtccaggagttcgagaccagcctgggcaacatggcaaaccccatctctacaaaaataaacaaaaaattagctgggcatgttggtgcacacctggggtcctagctgctcaggaggctcaggtgggagcatcgcttgagcccaggaggtcgaggctgcagtgagctgtgattgctgcactccaacctgggagacagagtgagactatgtctcaaaaaacaaaaacaaaaacaaacaaacaaaaagcttgttgacttgaactaactaaaggcagtagtactaattgaaaaagaaattctcaccatgtgggcatgtcctgcttgctatcttgttgcctgtgctccataggtcatgtggccttgaccctgagttatccagcttgtcatctccttgttgaagaaaactctccccgccattccccacacaaatcactttgcttccctcattctaaactctctctaatataggctcaatctctctatgaatcccttgcattcttaattcttccttcgccgtctgactttcctgttcttaggtatggctgaactggcggtgtgcttatttttcatttttcatttgatgaatggatagagcatctcacttgctctcttcctagagactgaacacatgcctgcatgaagggtatggaggaagccgtgtgactgagggggcaatgtctagtaatgtcatgccttaattgtaggctcaaattttaatgatgaattaacttcttgaaagttgatctttaggccaggtacagtggctcatgcccgtaatcccagcattttgggaggttgaggcaggaggatctcttgagcccaggaatctgagaccagccttgtgacatggcacaactccatctctactaaaaatacacacacaaaaaaaattagcttggcatagtggcgcacacctgtaatcccagctactcgggaggctgaggtggggagatcacgtgaacctgggaggttgaggctgcattgagctgtgatcatgccactgcactccagtctgggtgaaaaagcaagactctgtctcaaaaaaaaaaaaaaagtagatctttaaaatgaagtgtacagtgagaagaatatttcaaggaggaaggatgctttcatatattgggtttaag

SEQ ID NO: 3 - DNA, 125421 bp, Homo sapiens
caacaaattactacaactttaggggttgaaaacaacgcaagttcattgtcttacagttctggaggtcagaagtcttattaagtgggtcttacggactaacatcaagatatctgcagagctgcgtgtcttctggaggctaaatgggagaatctgttgtcttaactcttccaaattctggagatcacatgcattctctggtttgtgatccctttctccatttgcaaaacacaacacttcaatctctacttctgtcatgacatcattcctttttattctgaattactgcctaccgcttataaagactcatgattaattgggaccagttggataatccaggataatttccccatcgcaaaatcctagtttaatcccttttgcaaagcccgttttataatgtaatgtgatgtattcacaggtttcagggaaaaggacatgacatctttgggaatcattattcagcctgctccacaggatgcaatctggccccaaaagattcacgttcaccccacataaaaatacacttgctccttcccaaggtaccccaaagtctcaatgcattacaccatcaactcaaatccaaaatctttatctaagtcttttcaggtcaaattctcaaagtcgctgcagttccaaatctcatcatctacatcacctaaattaggtttggatgaggttctgggtataaagcataatggggaaaaatttatctccatctgtagacttgtgaaactaaaaaacaagttatctgctcccaaaaatgcaatggtggagcaggcataggataacagttatggacatttctgatccaaaggagataaaatagaaggaaaaaagaagtcacatgttccaagcaattttaaaatccagctgggcaaataccacaagaatccagtttctggaaataaacctccatagcttgagtatttgccttttgggcctgtggctctgcccttggtgttatccttgctttttttttgaagggtatttgcggctgagtagttttatcagcctgtttcctgccaatagccagggaccggggaggtggaaggtgggggtgggggtggaggtgtggagggtgggggtgtagggtgggggctggagggtgggggggtggaggggtggaggatgggagggtgggggttggaaggtggggggtggtgggagtggagtgtgggggctggagggtggggatggtggggtggagggtggggggtggaggggtggagggtggagggtgggggtggtgggagtggagggtgggggctggagggtggggatggtggggtggagggttgggggtggaggggtggagggtggagggtggtgggagtggagggtgggggctggagggtggggggggtggaaggtgggggcggaggggtggaggatggggggaagtggggtggttccgcagccttctttcatttcatcttcactttgtccctttctgtacaacctgcagtgtttgcgttgttataacattatcaaaagctttatggatctcccatttatatctggagattcacttcattagacacaaggcttcttcaccaatgttttctggataatcacatctccattcttggcttctgctgagatggctggtggaattcattatccacacgcctaatctcttcaaagatccttttatttgactgaatactctttcagatccttgtcaggcactggcaaagtgttatccagctcgacccttgagtttctcttcagagctcatgttcctggcaataaaactaattttaggatattttgaagtctgtagaggctgataatttctcaaatcataaagtcctggttcctgtttgcttaacagacttttccttaacttatgctttcctctcatcctttatcataaacagtgagaaataattgggttgccccttctacacagcttggaaatctcttcaggtaaatatccaaagtcatcatttacaagtgttgctttccacctaacctcatgataaaatttggctgcatttcctgtcactacgtagcaaggatgccttttcctccacttcacaatacatagtttccgtcgccttctgagccctcactagtagtgttttaacactcatctttctactaaaactctatttgtgatgatttagttactttctaagatgatacagctttactatactcctcacttctgtctgtgtcttcaccgtcagcaatttaacgaccctgtttacaatgatctagacattctttaagataatacaagtttttttcctactatactcctcattattcttccagcctctgccccttacccatttccaaagccagttctacatttttggcatttatttcatatagcaactctccatttctagataccaaaatcgatttaccattttttgaatgtctcccattttccagaattaagctaagtgctttataaacatcttaattatcttaacaactacccaaggggcacattattatatatattttacagatctgaaagacagttcagtatgatttaaaaatgtcagtctttggccccaggcagatgttgatttaaattctgatttcataacactttagctacatattcttgggaaaatcacttagtcttttaaaattttctgagcttcagttgcctaaaaactaaaatagtagaaataaaccctactatagaaaacaaattttattgccttttcttttatacattttttttctttttcttttttgttgttgttgaggggtacatagatatgcagtctgcttgccttaatgggcatgcaataggtgttattcttgatgttgttctattctgttgtcacctatggaattaattcatatgaaaaagaatattaccagaggagaggaaatatacataataaagatgcctggtaaaggagaataaaataggtatatttggagagacttaggctaatgtagctgatgaaagtttctaaaagttctgtggtgactgaaatgcttactggctccctcaactttccattgctttccttgaggataattaatagatatcagatatatcatgaattaattagggaaaagatggtagagtcagcaaagtttttgtttgatgaaaattcagatgtggaggagctctgtatttctttctttcttttctttttttttttaaacagagtttcactgtgtcgcccaggctagagtgcagtggtgtgatcttggctcactgcaagctccacctcccgggttcacgccattctcctgcctcagcctcccaagtagctgggactacaggtgcccgccaccatgcccgtctaattttttgtatttttagtagagacggggtttcaccgtgttagtcaggatggtctcgatctcctgacctcgtgatccacccaccttggcctcctaaagtgctgggattacaggcatgagccaccgcgcctggctggagctttgtatttctaaggaaatttagtgataagtcctgaaatcatcttgaacaatgaaaaagggttattataatcggtagttacttctaatttgtgttatatccttctaaagtagtttacttaataaaaagttccatatttggtttgtcaaccttggggatttaacacttcaattaaaatgtgatacttaacataaaaagagaaaaaagaaagagagggaacctctgggtctatatttattacttgcctcctcaataaagaaagaattgtttaaaacagtttattttaacataaaccaacccaggcgtcatctcagagctatctctttggaatttgtctgcaaatagaagttttatcatttgtcttttgaaaagggcacccaagtaggaagaacagctgtagtctacaattttcaaacttcataacgtaatttgttgactacttttttcaattaagttttatgctgtcagatagtgaggtggttaatttatatatgtttgcataaatatatactgtgctggaaaccccaaattgtcatcatttttataggtttaaaataagatttactgatgaaactgtttcctttctttttcatgggaaaggaggaatcatgtgaagaatttggacataaaatagaccaaaattcaaattccagttctatcacgtactctcttgtacctcggatcttaactttgttgagcttcttactcatctatgaaatgggtgtaataatacatttaaatgagataacatacagctcctggcaaataatattttctcagtaaacatttttgttattctttattttcatagtctctgttacaagtcaggtaaattatctctagtcctacccaattgccaaaccagtaaatataagttactggggcagttcagaattttcaatcatcctatggccttacctccaatttttctctacacatatatttcctttataccactaagcaaaattagaaatgtcttggtttatatatttcttcccatgctttctgtctctacaaccagaatataagcttcagaacaagagtattcaaatctggtgtgtttatccccagactcacaacactgggtccagagcaggtcctcagtagatgtttataaatatcaggatgtattacatatattaactttttatgagtagttattatttattatattccacttagatatggaattattacttcaggtggtagctgacttgtactggaaaagtgactgagcccaactctaatgctaatgttaattggatttatatgaagtttctttggttttaattgcactttgaatgaattcaagaatttcactagctataacttctatctatggtaagaagcgttgtccaagccacagaacctcaagattacaacagagatttaaattaaaactcttctaattgttattattgtaattattataattcaccaactggacaattggaacaataaactcttggaatttaaattaagtatggaatggggatggatgtttggggtgctttatagtttcctgtctccatctctctcagtggcctcttactctcaaatagcagtggtaattcttcttggatcattaacctaaaagagtctcaggaatgctttgtgaccattgctaccgaaatataactactcaatatgagtgggagataatgggtctggatatgttggccacatacataccaggtggaagctaggcctgggtaggaaccctgaaaaacgctttgcaagaaaattcaatatctttgaattacaataactttcaggaattctcattccatttagaatgtagacaaaggctaataaccaaactgaggtctctccctgaccattgaaggctggttctgggttctgcagggtgccctgccttgcaaagctctgatgtgctctggtttcccacattttcccacatcagcgctctgtttgcccacattttcctttctgtataactggatgaagaccccattactgagttttaatcagaacactacctctacatgcctggctagggtaaaagctatttctcatagtcagttcttccaattccagacatagaaaaatcacaacattctattttcccagaaggaatgaagtccatctcagccaactgctcttgacatctgtctccatctgtattagtctgttttcacactgccataaagaacttccctgagactgggtaatttataaagaaagagatttaattgactcacagttccgcatggctagggaggcctcaggaaacttacaatcatggcagaagggaaggcaggcacatcttacttggtagcaggccagagagagaaagagtgagtgaagggcaaagaatcccttataaaaccatcagatcttgtgagaacttactcactatcatgagaagagcatgggggaaaccactcccatgatccagttacctcccaccaggttcctcccttgacatgtagggattacaatttgagatgagatttgggtggggacacagagccaaactatatcactattttttgggtaccttccatttctttcagcaaagttagattttttttggggggctttaacatagggttcctttttggatgttccaccaaattactatgacattacagtaatataaactgagaaaacagatcagcaatagacagaagagtttgttatgttttgtcttttttttttttttgaggtggggtctcactctgtcacccaggctagagtgcagtggtgtgatcgcagctctctgcaacctctgcctcccaggctcaagtgatcctcccacctcagcctcttgagtagctgggaccacaggcatgtggcaccatgcctgactaatttttgtggttttggtagagatggggttttgccttgttgcccaggttggccttgaactcctgagctcaagcaatccatttgccttgacctcccaaagtgctaggtttatttattttttaagacattttaaattaatttcagtcaaatacattttagaagaagatcttatactgagaaggtatccccaggtcttttttatccaaaattgcataaaacctcatttcttttcactgcacaattattttcagtgtgcataatattcacccctaaaaaaattataatgatatatgtaatattggtatagaatgctgtatattcaacttaagaaaacgtacaattgcatttgtgaactaaataacacgttactaacagtttattttcacttttttttttttttttttttttttgagatggagtttcaccttgttgcccaggctggagtgcaatggtgtgatctcggctcaccgcaacctctgcctcccgggttcaagtgattctcctgcctcaacctcccaggtagctgggattacaggcatgcaccaccacgcctggcaaattttgtatttttagtagagacagggtttccctatgttggtcaggctggtctcaaactcctgacctcagttgatccgcttgccttggcctcccaaagtcctgggattacaggattgagccaccacacccgacctattttcacttatttttgtctttgtcttgtgggttgacttgtcctgcatctatttagcccagtaaatgttgctgttctacttttcctggcttcataatccacttttaggttctagctgcatctcaaataaatattggcaaagcaattcaaatccttaaaatgcctcagcagattgatgcattctaagctggagaaaaataaaaacagaatcatacatcatgtttatcagcctttgccatagagttctttgactataatgaattcattgagtcaaacaactttttccatgtctctctctcactctgaaatctggctaaataaacgtgatgtttaatatcttgcaagtatatttgcatgtgatggtagtttcctgtgtaattaaaaaaatggggaaaatgagcttatatattggctctgatagaacatattatggtggtaaatttgaaggaagctgaagggcaaacatagctgttgacttggcaagttgtcatgactaagaaggtattctgggacctatactcagtaaaaaaacaataagccactctcagcctagattttcttctttggaggacttggccgccagtgtcatttgcaaccaagaaaacttttataggtctgttcttatcagagccttcctttcatgaacaggcaggtcagtcaactcatcttcttttctcaacaatttagtgaagtcagaaagactgaaagacaaagcaaaaagaaagccagagttacagtgttttagataagctaaagcatttattgtttcaccatagcggtggctgatgcagatatatgtagctaatatctttaaaattctggttgattccctttctggttggttgcatacctttcccagtgtaacttctcagtgggagtaaatgatgttcatctagaccaaagatgcaagctatcatttctgtttccttcccacataggtatttgtctttgttttgcaagattttctttctctatccctcaatttaaaaggcaaattccttaaaaatccatggacaatttcaggtgtatagtgcatggttcaattgccccagaggataatgttgaagttgctttgcagaggggtgcaagagaaaggggggtgtaatccaagataatagtaaaagccgataagcattgccatttcaggaaactctgccacataacttggcagtttgaaaatttagccaacctttttatagggaggtcattaaattccagtatttcatacatattgtgcttcaaagcaggcaggtattcattatttttacttcattttgttttattaaaataaatgcttcagaataccttatgcaaaacaaaatccaaatacatttttgaaaacacatgtatactttgcttctaaactagaaaaaaccatattgctggtttaggtgacaattcaataggaagtgaaattttttaatctaatacatttttaaaaagctgagagtttactagtttcatatgtattttgccactaaatccctcttcattaaggatatttattgcaaaataatcatctttagaaaaaggaggtagatgtcttgattttgaaactgaacgataacatgaaactgaataacatgcataacctttacatttagaaacaaattgctataattgcctcttgaacaacaaataagcaaaaataacattaaaattaaaatattgtaatatttcttttaaaattattttcctttttttgagacagtctcactctgtcacccaggctagagtgcagtggcgtggttatggctcactgcagcctggacctcctgggctcaagtgatcctcctgcctcagcctcccaaaatgttgagattagaggcatgagccaccgtgcctggccttgtaatatttttcaaaaaaccgcttcttaaaccaggaagagaaaaagatatgcatcataattcagaatgcagtgtgtcaaatgacttaattttatttgatctgcagcagaaaaatgtaatttcttatttgagattctttgatgttgccatttcacttttgcctttcttgttggctaatagctgggaattatttcctggaaaagtatctgatccattaaggaaagaatatgaccatgtttcgtggaaattaaaaagtaatgtagacaaatattcatagaagatacaagtgtgaccctaaagttagtatttgaatgttgttctcctatttctgattttattgacccaaaatatcaagctaggtttatccatgtttgcgtgtagcattttaattacttagcctaagaaaagatggaattgaatttcaaatgtaaagcagtaggaaaaaaaaagagagatttctctttaggttttcaaaaatgtatttcttggagcttcttgattttggcagaatgagcaaaaacaggactgagaggactgaactaactattcttgtcgttgaatgtgggagttatttctgtttgcttcctctacaaaatcagtttctccaaccacatcttgagaagttttcctttgcacaacatgtttgacaaattgccaagcaaaggcattgaagaatctcggcttcatcctacaacctttttcttcatctcagaaccttcaacctacaactttttcttcatctcagaacacgtcttagaagatatgagtctccaaaatagcagaggggaatgttttacttaaaaaatgtgtgtgagatcactgtacataaagttattcacatgataatggatacagaactccattgatgaaaaacgttaggaattttctcatatatttaaatgtttgataagttattttctttattttggtgaccagaatgcacacaaatggttgcataatttatgtagatatatgcaaaagctctgccaacaggtacttgtgggagaatcaaagtctgctctatccatgcattccttttacattccttttacttccacctccacttcttatttctttctttttttttttttttttttttttggagacggagtctcactctgttacccaggctggagtgcagtggcacaatcttggctcactgcaacctccacctctccacctcccgggttcaagcaattctcctgcctccgcctcccgagtagctgggacgacaggcccacgctgccacacccggctaattttttgtattttagtagagatgggttttcaccgtgttgcccaggctggtctcccaaagtgctaggattatgggcatgagccactgtgcccggcctcacctccacttcttaacaagtactctatgctctaagttcattattttctcccactgggctccctttgctattgtacttctactcagttattgctcccgtttttattatctgcctccttattcttcttgtaaccgaagcattctctctgtaggtccaaaataaagtccaaggactagcagacactttccttttcaggacacaatatgttatctcatccctggaatacctaggatacatcgcacactccgtgcacggtgtgtgtgtgtgtgtgtgtgtgtgtctgtggtctgcgtgtgtatgcttctttgttatgcattgttaatttctttcactacaagtattttaagttttttgaacaaaaagaactatatttcaataatagttatcatctactgaacatctgagagtagcaacaaatgttagagtgaacattgtaaaataattaaaaggaccaaattacactttcttacctgccttttttttttttttttttttgagatggagtcactctgttgcccaggctggagtacagtggcgtgatatcggctcactgcagcctctgcctcctgggttcaagcaattctcttgcctcagcctcccaagtagctgggattacagaccacgcaccaccacacctggctaatttttttttttgtatttttagtagagacagggttttgccattttttctgtaatattgagtagacatctggcccattcacatacctaatagtaaatgttataatgtaaaaaaaaaaaaaaaaaaatactagtttctacaaatattgtctcttttacttttatagccagagaatcactttcttatagttagatatggtattgtaactagttctggctaatggaatgtaagcaaagtgttatgtgcaacattttttcaaaggtttagggcaagatcttcatcctttatggctggggtacaatcaatcatttcggaccagaaatgaacatgggatctgcatggcttcatattatcagccatggacaatatcatttgagaaaaggattgttaaaaattaatcatagaaacaaacaaaattttattctattttgtttaagccactgttagtttgggtttctgagattcactgctgaatgttattctgatacctccacttcaacctacgatgtgtaattcccagtttacctgggacagtcctgaattacagtgatgtcttgtaatttttctgctacttcccaggaccctcaaaagtacctggcttaggtgatatgttatatagtgatgcttcttaattctctagactccgaatgttattagctacagcaacatttatcgaagtaacatttttcctaggagtttaaatgtaaaacagctaaagacaaagttactctgggtcagacatgtctggaagagctacagttctccctaatacctacagaccacaaactgggcctgaactggtatctatatatgtgtgtgttggtgggggtgatatctatttattcatttgtttattttttttccactggataggaatttctaacaattaaaatatgttattgttcttagagctaaacataatgataaatgtaagggagacataaggaagatcctacatatagtttttgtttgtttgtttgtttgtttgagacagagtctcactctgttgtgcaggctggagtgcaatggtgtgattttggctcactgcagcctctgcctcccaggctcaagcaattctcctgtctcagtctcctgaatagctgggattacaggtgcgcactgccctgcccgaataattttttgtatttttagtagagccaggggcttcaccgtgttccccaggctggtcttgaactcctgagctcaggcaatccacccgccttgatctccaaaagtgctaggagtacaagcatgagccaccgcacctggcccctggtgtatagttttagagactccttttcaattgtgtcagaagtgtttgaaccagagcaactccatcttgagtaggggctaggtaaaatgaggcagaaatctactaggctgcattcccagatgcttaggcattctaaatgatggatgggataggagatcggcacaagatacagttcataaagaccttgctgataaaacaggttgcaattaagaacctggctaaaacccaccaaaaccaaaatggtcacgagagtgacctctggtcatcctcactgctacactcccaccagtgctgtgacagtttacacatgccaaggcaacatcaggaagttaccctatatggtctaaaaaggggaggcatgaatactccaccccttgtttagcatgtcatcaaggaataaccataaaaataagaaaccagcagcccttgggtctgctgtgtctatggagtagccattcttttattcctttactttcttaataaacttgcgttcactttactctctggattctccctgaattcgtctttcttgagcgaaagccaagaccctctcttgggatctggattgggacccctttcctgtaacaattgtgtcctattacattcagccaatttagcaaattgatttatgattcttacatatccataggataagtatgtggattatcttcattttgttactgatgagaaaatggacacttaaagaaattcagtgactttccagggttacataccatctgactaaatggcaaaactgaaatcaagcccaaatacactctacctcctctcacaaattttggaaacatttaatccaatccttaaatcaacagaggatcaaactgaggcgcagggattgctgaaatagacaaggagtaacaaagtttgccccgttagagccaaatgatgagcttctggccttttgaaaagtttagttgtaaaatagtccctatgagtaggaaggaagacacatttttatttagttttatgtaaatggtgcgagacaaattcagccttgcctaaggcaactgaaaaaccatctttgagtgaattattcctttgaagctttatcttcaaaaggcactgctactctttaactttggcaggaaaggggaacacctgcagcaccgttgcataaattggcttcgttggacctccttcatcagccagagctggagacctacgtgggttataatgtctggaaagggcaaggtggtggcctgagtagtctgaagtctgttattctggtaatggttccctacttagggtatttctaactatgaatcaggccttcaggagaaatattactaactggaaatattgagggacgtggagacaagatgtgagcctacagcacagctttccttccagtgcgtatggtacataggatgcccaagtgcgggttcaaatatgctgagatgttgattcgctcagcccttgggatggatcttgcaatgagacttgctcagtctcatttgtttttcccgagtacagggtaccatgtacctaaaatcgtttgcttgttactctgggatatcatgggaagccctggcctagggcatctagaactacatgcagctagcatgtggaggactgaaagaattctctgaaccgaagagcatgtgatttggaatttttaaacatagtttctgtaaatatagatggagtcttccctgcacatataaggcatatcccgtggatccaaaggggtaactatgtgatttgacagcaaaagtggatgtgatccacaaagcagagaaatacggagccaggtccaccttggaaaaacaggaacacatatccacactcagtacgcatcctctctcatctcacgactctcatcccagtcagagttgtctgaatggacaggattactggcaaatatttgctatgatgaagatttttttcccatgattgctaatattttatgcctcaatcccccattcctccccaccccagcaaaccaagtccttcatgatgtttccatggctcttgcagttcctagacaatctgtttggcttccccatccaagatttttggagtggaacactggaatataggatagcatcacaagttagtcaagaaagtcaataggaagtgatgtttatagctgggataagatgtccttttaggccacttaagctttgtacatggacctgcactgtgtgtatttcatagaacagctaggtagcatttcccatgtcgtgtctaccacatgttggatgtcagggtgggttgaaatgctttggatcagtatttgtcaaattatgatctgtcgactaccatcttctaggactaatacattaaatatattttaaaaaattggagttatatgtttaagtaatggtcaggattaattctagggatagaaagttctagggataaatattcaagactaagtagctgagagacacaatcaagaacagaatttttttctttatttttttaaactacactatgttttgtgtgttggcttctctacatttccctcatggttactagatgattgttatgtctctatgactgcatcttccttccagagaggagaaaagaggaagtaaaaaggggttaaaagtcatgttagtggagtctttcccttttatgagaaaaacaaaaaacattcctaggaactttcctcttaagtcgcactagacaggatttagtcacatggctaccatcaatacatctttggaaaagggtaacaagattaccacaactagtcatggccagggtgaccacctgcctatcaaagatttctgtttctttttcatggtgtagaatggttgctaagaaggcacacttccaagcctttcttttttttttttttttttttaattttttttttttttattatactctaagttttagggtacatgtgcacattgtgcaggttagttacatatgtatacatgtgccatgctggtgcgctgcacccactaacgtgtcatctagcattaggtatatctcccaatgctatccctcccccctcccccgaccccaccacagtccccagagtgtgatattccccttcctgtgtccaagtgatctcattgttcaattcccacctatgagtgagaatatgcggtgtttggttttttgttcttgcgatagtttactgagaatgatggtttccaatttcatccatgtccctacaaaggacatgaactcatcattttttatggctgcatagtattccatggtgtatatgtgccacattttcttaatccagtctatcattgttggacatttgggttggttccaagtctttgctattgtgaatagtgccgcaataaacatacgtgtgcatgtgtctttatagcagcatgatttatagtcctttgggtatatacccagtaatgggatggctgggtcaaatggtatttctagttctagatccctgaggaatcgccacactgacttccacaatggttgaactagtttacagtcccaccaacagtgtaaaagtgttcctatttctccacatcctctccagcacctgttgtttcctgactttttaatgattgccattctaactggtgtgagatgatatctcatagtggttttgatttgcatttctctgatggccagtgatgatgagcatttcttcatgtgtattttggctgcataaatgtcttcttttgagaagtgtctgttcatgtccttcgcccactttttgatggggttgtttgtttttttcttgtaaatttgtttgagttcattgtagattctggatattagccctttgtcagatgagtaggttgcgaaaattttctcccatgttgtaggttgcctgttcactctgatggtagtttcttttgctgtgcagaagctctttagtttaattagatcccatttgtcaattttggcttttgttgccattgcttttggtgttttggacatgaagtccttgcccacgcctatgtcctgaatggtaatgcctaggttttcttctagggtttttatggttttaggtctaacatttaaatctttaatccatcttgaattgatttttgtataaggtgtaaggaagggatccagtttcagctttctacatatggctagccagttttcccagcaccatttattaaatagggaatcctttccccattgcttgtttttctcaggtttgtcaaagatcagatagttgtagatatgtggcattatttctgagggctctgttctgttccattgatctatatctctgttttggtaccagtaccatgctgttttggttactgtagccttgtagtatagtttgaagtcaggtagtgtgatgcctccagctttgttcttttggcttaggattgacttggcgatgcgggctcttttttggttctatatgaactttaaagtagttttttccaattctgtgaagaaagtcattggtagcttgatggggatggcattgaatctgtaaattaccttgggcagtatggccattttcacgatattgattcttcctacccatgagcatggaatgttcttccatttgtttgtgtcctcttttatttccttgagcagtggtttgtagttctccttgaagaggtccttcacatcccttgtaagttggattcctaggtattttattctctttgaagcaattgtgaatgggagttcactcatgatttggctctctgtttgtctgttgttggtgtataagaatgcttgtgatttttgtacattgattttgtatcctgagactttgctgaagttgcttatcagcttaaggagattttgggctgagacgatggggttttctagataaacaatcatgtcatctgcaaacagggacaatttgacttcctcttttcctaattgaataccctttatttccttctcctgcctgattgccctggccagaacttccaacactatgttgaataggagcggtgagagagggcatccctatcttgtgccagttttcaaagggaatgcttccagtttttgcccattcagtatgatattggctgtgggtttgtcatagatagctcttattattttgaaatacgtcccatcaatacctaatttattgagagtttttagcatgaagggttgttgaattttgtcaaaggctttttctgcatctattgagataataatgtggtttttgtctttggctctgtttatatgctggattacatttattgatttgcgtatattgaaccagccttgcatcccagggatgaagcccacttgatcatggtggataagctttttgatgtgctgctggattcggtttgccagtattttattgaggatttttgcatcaatgttcatcaaggatattggtctaaaattctcttttttggttgtgtctctgcccggctttggtatcacaatgatgctggcctcataaaatgagttagggaggattccctctttttctattgattggaatagtttcagaaggaatggtaccagttcctccttgtacctctggtagaattcggctgtgaatccatctggtcctggactctttttggttggtaaactattgattattgccacaatttcagagcctgttattggtctattcagagattcaacttcttcctggtttagtcttgggagagtgtatgtgtcgaggaatgtatccatttcttctagattttctagtttatttgcgtagaggtgtttgtagtattctctgatggtagtttgtatttctgtgggatcggtggtgatatcccctttatcattttttattgtgtctatttgattcttctctctttttttctttattagtcttgctagcggtctatcaattttgttgatcctttcaaaaaaccagctcctggattcactgattttttgaagggttttttgtgtctctatttccttcagttctgctctgattttagttatttcttgccttctgctagcttttgaatgtgtttgctcttgcttttctagttcttttaattgtgatgttagggtgtcaattttggatctttcctgctttctcttgtaggcatttagtgctataaatttccctctacacactgctttgaatgcgtcccagagattctggtatgtggtgtctttgttctcgttggtttcaaagaacatctttatttctgccttcatttcgttaggtacccagtagtcattcaggagcaggttgttcagtttccatgtagttgagcggctttgagtgagattcttaatcctgagttctagtttgattgcactgtggtctgagagatagtttgttataatttctgttcttttacatttgctgaggagagctttacttccaactatgtggtcaattttggaataggtgtggtgtggtgctgaaaaaaatgtatattctgttgatttggggtggagagttctgtagatgtctattaggtctgcttggtgcagagctgagttcaattcctgggtatccttgttgactttctgtctcgttgatctgtctaatgttgacagtggggtgttaatgtctcccattattaatgtgtgggagtctaagtctctttgtaggtcactcaggacttgctttatgaatctgggtgctcctgtattgggtgcataaatatttaggatagttagctcctcttgttgaattgatccctttaccattatgtaatggccttctttgtctcttttgatctttgttggtttaaagtctgttttatcagagactaggattgcaacccctgcctttttttgttttccattggcttggtagatcttcctccatccttttattttgagcctatgtgtgtctctgcacgtgagatgggtttcctgaatacagcacactgatgggtcttgactctttatccaacttgccagtctgtgtcttttaattgcagaatttagtccatttatatttaaagttaatattgttatgtgtgaatttgatcctgtcattatgatgttagctggtgattttgctcattagttgatgcagtttcttcctagtcttgatggtctttacattttggcatgattttgcagcggctggtaccggttgttcctttccatgtttagcacttccttcaggagctcttttagggcaggcctggtggtgacaaaatctctcagcatttgcttgtctataaagtattttatttctccttcacttatgaagcttagtttggctggatatgaaattctgggttgaaaattcttttctttaagaatgttgaatattggcccccactctcttctggcttgtagggtttctgccgagagatccgctgttagtctgatgggctttcctttgagggtaacccgacctttctctctggctgcccttaacattttttccttcatttcaactttggtgaatctgacaattatgtgtcttggagttgctcttctcgaggagtatctttgtggtgttctctgtatttcctgaatctgaacgttggcctgccttgctagattggggaagttctcctggataatatcctgcagagtgttttccaacttggttccattctccacatcactttcaggtacaccaatcagacgtagatttggtcttttcacatagtcccatatttcttggaggctttgctcatttctttttattcttttttctctaaacttcccttctcgcttcatttcattcatttcatcttccattgctgataccctttcttccagttgatcgcatcggctcctgaggcttctgcattcttcacgtagttctcgagccttggttttcagctccatcagctcctttaagcacttctctgtattggttattctagttatacattcttctaaatttttttcaaagttttcaacttctttgcctttggtttgaatgtcctcccgtagctcagagtaatttgatcgtctgaagccttcttctctcagctcgtcaaaatcattctccatccagctttgttctgttgctggtgaggaactgcgttcctttggaggaggagaggcgctctgcgttttagagtttccagtttttctgttctgttttttccccatctttgtggttttatctacttttggtctttgatgatggtgatgtacagatgggttttcggtgtagatgtcctttctggttgttagttttccttctaacagacaggaccctcagctgcaggtctgttggaataccctgccgtgtgaggtgtcagtgtgcccctgctggggggtgcctcccagttaggctgctcgggggtcaggggtcagggacccacttgaggaggcagtctgcccgttctcagatctccagctgcgtgctgggagaaccactgctctcttcaaagctgtcagacagggacacttaagtctgcagaggttactgctgtctttttgtttgtctgtgccctgcccccagaggtggagcctacagaggcaggcaggcctcctggagctgtggtgggctccacccagttcgagcttccctgctgctttgtttacctaagcaagcctgggcaatggcgggcgcccctcccccagcctcgttgccgccttgcagtttgatctcagactgctgtgctagcaatcagcgagattccgtgggcgtaggaccctctgagccaggtgtgggatatagtctcgtggtgcgccgtttcttaagccggtctgaaaagcgcaatattcgggtgggagtgacccgattttccaggtgcgtccgtcacccctttctttgactcggaaagggaactccctgaccccttgagcttcccgagtgaggcaatgcctcgccctgcttcggctcgcgcacggtgcgcgcacacactggcctgcgcccactgtctggcactccctagtgagatgaacccggtacctcagatggaaatgcagaaatcacccgtcttctgcgtcgctcacgctgggagctgtagaccagagctgttcctattcggccatcttggctcctccctctccaagcctttcttgaatctaggtagagccatgtgactaggtgctgccaatagaatatgcatggtagttattgggttctccaggctgaagcagtgaatgagtgggtgtcccctttttccttgttccctctctctctgtatctcactgtgtgtgagtgtgtgtgtgtgtgtgtgtatggaagctggaagaaagctgaggccaggggagaaggtggagagccataagatgttcatgagcattacctgacaagtacccgcttttgttgctgtgtgaagagtaagtgaaatttttattttgttaattcaaggagattttaggggtccatctgttatagtagctacccttaccctaaatggtaccctggtttaggccagtcatgattcatcctctgaaagtagagtgacagggcctattttccttaagttcttgatgtctccctgctcttaacctattaattgagcctctgttaccaggtatagatattataacaatagtagaaagtgtctcccacagtacgtcataacaatttttgtatgcctgttgaaaatacagagcccttaactcttccccaggattactgaattaggctcagctgtctacatatttaaaagtactctaaatgattctaatgtaccctgaatttggacacaactgctccataaggtgtcatggagcagcaacccatggatcatcaatgtaccgtcctcctccagagcattgatgtgctgagaagtagaaggtattagaggcagaagccatcattccttacaagggagaatgggagtagtgggtcttgatgccgacagcagacacagggatgatgtccaccgtaacctggataacgtcataataatgtaacatagtaaatatgatttaaaggaggagtaccttcaaaataagacaggaagaagcctgtcaagtcactcaagctcttctttgccccaaaacagttgcctatgacactttaccaaagcattattacttaaaggttttaaagtaacatagaccagcagcaccaccttgcatgccatatttgagctttttaaagagcccattgcctagtaagggtacatgaattcagtaaggcataggtctgctagacacaggcattcaacgctctggaggagattatatgaaactaagagttgagagtcacttttgagtgatgtagcgacgcaaataagaattttcaaatctgtcaaaatgtaggctgttaagtttgacctggggcactaagtctgaagggttaacagagaagtgatgagccaatgtaaagctgtatacacacgtgcacacacacaggagctgggtgagaatgttcataaagcaacagggaaatgtggttagtgagcacctggcaaaatggctttacaaatgctttccctgagttttaggtagaggaatgtcttgttggtgtaagcatacaaaccaaagagctctgaagtaattcactattgccttgaactttaggtgacccaaatcaaggaataagggatagcttaatttaatgaaagtagaaggtaaaaaaaaaaaaaaaaaaaagttcagtctatttggtaagaaaacctctttggcaaacagcagacatgatgttgctgatggaatctttaaagaggtagcggatttggtgaaggacttgtgtttggcatggaagggctgggcaagaagaaccctctccattgcatagcagagggttccccctttcaagcgtgcttagggagatggagttagtggctgaaacacaaatttaagccctttgaaatgtaatatcctacgccctctggtggttacattttttaaaaatcgtactaaagaaaacaggttgaagaaatcatagaatgccaattacaggaataacagggatcttaagtgtcatttgtcagagctgtattcaagatgcccttatcgttagttaaaggtgtcagcccctgaatcagaaagaaaaaaaaagccttatttaatcagttttgcaaatgcttgagaagtcagctttctcccggtttttctccatcacttttcaggaacttttccattatgcctctgtcgtcagaatacttccgagatttggaagatagtgactccacttgggatggctctgaggtcctgctccttcttggtattttgatagaaaagccttttgccactcaaaggggaatttctaaaagaaacttcaaaccacacaattactttaaaagggtgatcacacagtaatacattgaatgatgcctggccaggatctaacaaacttgtctgtttccctctttgttgtgtctgggagacagaaagacagcctggccattctcatggcaaactgtcattaaattatatcaagtgtaaatagttgtgactgacactgttaacaaagaacaggaatccaggaacaaaagggcacttcaatgaagattagatgttccttaagcaacagattttaaggacctagattccataaaattagagttctgattaagtcttatagatatatgtgtatgacatatgcaagaggacttagataaaaatttcagagaaaaattgaattaaagataaaaattaaaaatacaagctttgtcaacataagcttcctcaagttcaggacacttttgtaagtgatgatacctgccatttagtccacctataaaaaaccgatggtccttggaatttaaccatgtcaatgcagtgttttttccatattagctgaagaaaaataggtaccttaaaattttttgttttaggatcagaaaacaaaaagaagtcagaaggatccagattaggactgtaacatggatacttaatgatttcccattaaaactctcataaaattgtctttgtttattagagggatgagcaggagcattgtcctggtggagaagcactctttggtgaagctttcctgtgtgtttttctgctaaagctttggctttctcataacactcttatcataagcagatgttattattctttggccctccagcaaatcaacaaacaaaatgcctcaagcatctcaaaaaactgttgtcatgatctttgctcttggctggtctactttggctatgactggaccacttctatttcttgggagccattattttgattgtgctttgacagcaggacacactaataaagccatgtttcctctcctgttacaattctttgaagaatacttcaggatcttgattctatttgtttaaaattttcattgaaagctctgttcttgtctgcagctgatttgtgcacaacagtttttgcacctatcaaggggaaagtttactcacctttaatttttcagtcaaaattgtgtggctcacgcctgtaatcccagcactttgggaggcctaggcaggtggcttacctgaggtcaggagttcgagaccagcctgcccaacatggccaaaccccatctctactaaaaatacaaaaaattatcagggtggatgtggtggtgggtgcctgtaatcccagctactcgggagtctgaggcaggagaagcacttgaactggggaggcagaagttgcagtgagctgaggttgcactccagcctgggcgacaagagcgaaactccgtctcaaagaaaaaaaaagaaaagcaagaaaaaagccgtgtaaactaaacgaattgaaatatctattgtgttggctgttggttctgctattaattggtggttctcttcaattaaggcataaacaaaattaatttttttcttgcaaactgatgtcgatggtctgctcctttgggctcatttcaacatcatctcattgacaatttaaagtgagttactcatttataaattactgatttatttgggacattgtttccataaacttttcataaagtgacaatgattttgccattctttcgcccaagctttaccataaatttgatgtttgttcttgcttcaattttggaagaattcatattgctttgatagggaatcatttcaaactcatgttttgtaattcttagtgcctctaattagatcctgttcagtcatattgtaacaaattggtacaagtttatttggtgcaaaattttttttgaaatctatacgtagattttgcaaaataaacattttccataaagcttctgacaaccccttatttatagcaagatctttatttagctagatatgtaaagctagaatatacattcatacaatgcaaacagcataatatatgtttaacaaatatttacgaataaatcaaaggaggagaaatctgaaaaggtcttatattttgtgcctagatttttctgaaaattcattttctaacaaatcatacggtgattttgatttggtggtgggaagagtggtgggtgggttggaggatgttgttaaattggagaaaatttagattcagagcaaaataaaaggtatctttaaaacattttttgttttttaaatttgtttgtattttctattttcatttttttctacatttaaataagaaagtttgtattatgcaaatcccaggaactgtattaagttgaattatcactatagaggtgaatggttccgtaaaatacagttagtggaaccttgttaaaaacaccctaatatcctaaaatgactttgaaatgtgatctgaaaaccctgtcattttccagtttgaaaatgtagaaatctaaaaccaattataatagagaaaaaaatttaagtgaatgtgattttgtgtgttgttaggagtcccttcactttcctgtgtacaattggctttcctatatgaaagcacttgcatttgatggcccgtttataaggaaaacctttgattgcaaccttttggaattcgttatgtttatttccagctggacatcaatttaactgaccattgtgtttggcttccagttatgaaatgaaggaatctctaggtttaaaaatcctaataattgtttctgaagcagctttaaccactggcagtccagcagatattcactgaggcactagtatttctcttgagttaaaagaaaaagaaaaagaaaaaagaatgaagaaaaaaaaggaaggaaggaaagaagagagctggagagagggaatgagggagggggaaaggagggagagagggagaaagggatatttagcagctctgtagatttctcttaaaaagaaacacttaaacaatgtactttcacacatttgtccagtgcagttactggcatataactgattcacaataatgatttttaattaaactcttggtcccagtgcaaaaaataaatatgcccagaaaataaaaatataaaagcctcaccaaaactttaataactttaataaacttttattatgttaattgacatataattgcacagatttatggggaccagtgtgatgttttgatacatgtatgcaatgtgtaatgatcaaatcaaggtaattagcaaatccaaaccttaaatacttattatctctttgtgttgagaacattcaaaattctctcttctgattgctaaaaaaatagaataaattgttaactacagtcaccttacaaatgctgtgaaacactagaacttattccttctatcttgctgtaattttgttttggttaaacaacgtctccttatccctgctcacttttcatcctttagtaaccactattctactctctacttctatgagattgacattttagcttccatatatgagtgagaacatgcagtgtttatctttctgaacctggcttatttcacttaacacagtgtcctacagattcatccacattgccactaatgatagaatgttactcttttttaatgactgaatattccattctatattataattatatataatggagtaatatgtatttataatatagttgtttatatatgtgtgtgtgtgtgtatatatatatgtgtgtgtgtgtgtatagccattatggaaagtaatataattatatatgtatatataaaatcacatctatatgtaaaactttttatttctttgttcagtcttgtaggttatatgtatccaggaatttacctatgtcctttaggttttctaatttgttattttacatatatatatatatatatatatatatatatatatatatatacacacacacacacacacacacacacacacacacacatatatatatatataaacattttccttttccattcacctgtagatgggcattgaggtcatttccatatcttggctgttgtaaatagtgcggccataaacattagaagccttgtcttcaggttcagaaattcttctttttgatttagtctcttattaaagctattgattgtaattttttttgttttttattatgttttttggctccaaggtttttgtttagttcttttaaaggtatctatctcattgttgaatttttctttcaaatcacgaattttttctttttcttttttttgagatggagtctcactctgtcacccaggctggagtatggtggcgcgatctcggctcactgcaacctctgcctaccgggttcaagcgattcttctgcctcagcctcccaggtagctatgactacaggcgcgtgccaccatacctggctgatttttgcatttttagtgaagacagggtttcaccatgttggccaggctggtctggaactcctgacctcaagtgacctgcccacttcagcctcccaaagtgctggaattacaggcatgagctaccgtgcctgacccaaatacccaaatcattttttttttttttgctctattttctatctgtattctcttgtatcctgtatagtttccttaagatcattcttttgaattatttttctggcatttcatgaattttctttggggtctgtcactagagaattattatgtgtctttgaagctgtcattttttttttttgcttgtttatgtttcttatgtccctatgttgatatctgcacatctggtggcaaacttgtccctttcagttttatggagtagcttttgtaggaaaagacttattcctgtagatgagctctagcatattggctgggtaagatgcactggttttggttctgggttgacacagtaatatagtttagttttcatgcaatttcttaggttatattttatgttaacaagatatttgcaagtgtctaagtggcctaggctgtggaagtttgtgatcatggtggtgtagctttgccagctggccctactgggcctactgggctgattctcaggccacagacatgtaaattctcatcagagtaaggtcactgagatatttcccttaccaggggtacagacatgcagacgtgtggcagggtatccaattcagaggaaaggccacattggatgcgtttgctaggctgtttctctggctgagaacataaggatgcagcagcttggcccctggggaatgaactgagtgctggaggtgggtcggcctgctaccctagcccaaggtgtgggcacatggtagcttggccagcttggaggaaagttgaacttataaatattgtgacatccaagatttatttttatttcaaaggattaaaattaatagttgtaacagtccactgtgaagtaaaaactacccaaatatttattgacaatagaatggatatataaattgttgtctaatcatacattagagtaatatccaacaatggcagtaaattatttgtaattgtatgcaacaacatggacgaatctcaaaacatcatgttgagtaaaagaagccagactcaagagtgtacatattgtataataccccttatagaataaacaaagttgtgcaaaattactctttgctattaaagggagaaatgctagtgacagaaagtgatcatgagacattttctttgatgctacttaagtatatgcatttgagtatatgcatacatattttaaagatggcatctaaagtggtctttctaaaacaaaaatataatcataaaaatctcatgcccaaaaagtttatactctaaaaggctcaccatttcaaacagataacatccgcctaatctttaacatggctaacccaatttttcatatcgacttctctgacttctcttggcttatctttcttttggattccttacccaaacctttatatattcatgtacacctcactaattatccacagttttcttattattcattaaattccccacttggtctccttcttacatgttctccccaatctggttagagatctctcctacttcctcccaaagcaccatgtgtttccttcagcttagcagttaccacattccttggtaagtactaatcaatttgtatgtttaccggactcagactgtgacgacaaggaccttatttatccccactgtaaagtcttgtgcctggaatacaaccgaatctgaatatctgttttctgtataactaattctatcatggatgagatttttataattattaatgtgatgtttcttcttttgctattttatttataaggctttttgtctttatgaatgtacaattgggacctctgtttgtgtgagaaaattaagatttattatataaagtattcatgaaaaatgctgcatgttagaatattaattcatcttctaacatgcagtatgtgagtatgtgtgtttatactgtatatgtattctttatgcagatatagaaagtaagctaatattgacttccctcttttttgtcattataaggttttataggaaaccaagtgttttctcaagaaaaactaagaatcaccttaaaaattagtttgagttacccaattgtatattagttatattattttactctgctacccatgaggcaaggttaaagacagaaggctagataagtgattcacaaaaataaagataatagaatatatatataatatatatatacatctccaagttgtactgtgagtttaaatatatgacccacttactaatcaatcaatggagaaaagctatgacatatttttaaggtgacatgttagaggtatttcatgaatatttgagatttgataagacacacatattaggtattagctaagtattcctaattattaatgtaaactagactagaatgtgcattagaaagagtagtagatatattgtcacaaaagctgagtgcgaaaagcaacaccagcaacttccagggtgatgccgaatatattattgcaggcttgagttccctcatctctaaaataaaagaattggaacagctgattcatatgttaggctaatattctatgctcttccctgaactgaaaagcctctttaaaagtttttttaatgtaatgatttagctataatactgcctttaaaaagggattgacagaggaagcatttgaatttcaatctggccttacatgcatttcttttgaaaagtcattagaaatgtctttagaaaggtactatgtgtttttaagggcaacatattagttattgtagtttttgagcacatttccataacacatgtgttgtggggtgttaccaccaccccaatcaaaacataaaatgtttccatcttctcataacctttcctctcactacatttggtcaatcctcttgtactctatcaccatggatgaattttatctattttagaacttcatataaattgattcatgtagtatgttctcttttgtctcatacttccctcattcaaaataatgtctttgagaattagtttgtgttatttgcctatcagttgcttgtatgttttttaatttttatttttcaacttagtagtcttccattgtatacatataccacaatttatttctccattcacttgttgataaacatttagtttttttttctgatatttggtaattataaataaaaatgctagaaaaattcttgaacaagtttttttgggagacacatgtttttattcttctaggataaacatctgagagtggaattgttgagtcatggacttaacacatttttaaaataaaattttaaagtaaaaataatttaaaaaagaaaagatctttcatgaatttagtagtttatttctgagtgtaatcgacttcattattttggccttttttttgatgggggggtggtggctggagacttgcctaacttatgggaatctggaattgcccttggcattgcatgtggcaacacaatggtacagaagcttttgtgaaagtttttgtttccatgaatgatgggaactgccaaaattgagaattatgcactctgagtgaactttcacatagcttaggttggcatcaccaagtgagaagcccaggacttaaaaaataaggtaaaacaagacaggaggtttttgttttgtttttcctagactatggctcaaggaccacctgaacggaaatcccctgggtagctgattaggcatactttttttttttttttttttcgagatggagtcttgctgtgtcacccaggttgagtgcaatggcatgatctcagttcactgtaacttctgcctcctgggttcaagcgattctcgtgcctcagcctcccgcgtagctgggattacaggcacccgccaccaagcccggctaatgtttgtatttttattttagtagagatagggttctgccatgctggccaggctggcctggaactcctgacctcaggtgatctgctcacctcggcctcccaaagtgctgggatcacaggcatgagctaccatgcccggcctagacgcactttttaacaagcatgtaagagactcttacacatagtgaaatgtaagaattgctagatcaatctaaaccagagatcctctgctgtggcggcacatttgcatcaccaagggagctttcaaaattgccatgcccttgacatgcctaagaccaattaagtcaggatctctaggcatgaccaccagatatcagtattatttaagtctccccaagtagttacaatgagtagccaaggatgagatcttctggtctattctatgtcatccttagcacatctgagagctccactgcctgcatgtctgatgttttgttgtacaactacgtcattctgacaatatttcaaagcattgaaagaacatttatttcctttgtacaaaatgccttgagcaagcaagattgtctcaggtgcatttgccgtaattgcttgccttggtcttattaccttgtgaaaaattatgtatctttaatctatgctttgggtggcaaaattaattaataattaactttgtacttacctaataaaataatgttgatgtaaagtcctctaagtagtcctctcacttactaattttatctatgtattggcatgaatatcttggttgaaccaaagaaataaaacctaaaatatatgcctcacaaaaatgtgctttatttaagtagattcaatgaatgagatatcagctctcctcaaatcattataatgtacctgtaagtaacgaactttcataatgtatttaatctataaaaatgattctatatgcagcttttcaggaatgcatgcatatatttcagaaagtaaaattccctttttttccaggggaagacttactaagatattccacttgaatgtatgaagtacttgataaagtgcatttctgctttacatggttggaattctactttagtgctaaccttgcatttttaaattttgctaatagagaccatataaaaattcacctgcaaagcaacttaaagaatgttcttatttattatttgtaaatgtggcatcctttacctatcatgcacaccctgcaacatctcccccaattaaatagattttgttcttcaatgaagtacaatagtttgatggattacatttaggaaaacacgtcagtcaatatgaaccaccgaatcccaaaatgctattcaaatacccttatgatctctttaacaaacaaaagccttcagacatcatgtaagaaccattgcatctttactttttaatgcaatacaattatttgtgcctacctaaaggtaaccagatacaggttgccttttgaagtttgcagtagcttcattttattctgaaccagaaagttagccacaccagagaacacttttttcccattgtcttcttcaaatgtggttttgattgcccattgacaaagccaagctagtgatcagtatattgtgattctcctaattaaaagcatgctaacacctagaatacagtagttgtcccttatccatgggggatatgttccaagatccccagtggatcctgaagccgtgggtactgaaccctatatataccctgtttttttttctatacatacacacctatgactaaatttaagtataaattggacacagtaacagattaacaacaatcactaataatagaaaaattatgacaatattttgtaatagaagttgtgtgaatgtggtctctctttctctcaaaatatcttactgtgatgtactcacctgttttcagaccatggttgactgtgggtaactaaaaccatggcaaccaaaaccagggataaaagggcactactgtaaaccattcccatagtcccacaactcccatgataaagacttcacactataaatgaaagaactgtttgattggcacagacccatctttgagagagcctggagagcctggccaccctccccccacaatatgtgccaatgtgccaatcatgtctctttggaatttcacaggccatagcctttgttatgtgcccttaaaacagcccctgtccatctaccatgctgttggctctctgccatcctttctagcactcttaaaacagactataattggcatttgcttggctgggagtcaatttattttattgctacctttcccagttgccttaaccgttggatgtcttgacagttggcaaatgtagactgtggttctgatatgtcacataaaatctgttggatgaatactttcctctaggaaaaagtgaaagtgaaatcccatcctggtccaccctctttccaaaacaataaacatttcctggcttccacaattcccctaatcatttaaagcagtacagttgttatggaatgggcagctgaacttaatgcgtgtctggaccatctgttctagtatttagtcttaaagaagattgcttaagtgactacagttcattgcaaagagggtgagttccatcagggaaagtgctagggtactatgtcatagaaaaacataatccagagactctggaaggactatttttcacttagcaatgcttaacatccatggaaaaaaataaattattttcctaggtacacaagtaatacacagacaaacttgtctccaaatttgtgatttgtgttacattatggacacaaatatgatatggttgtagaagagacacaaagagttttatcgctttattttcttgagacatatttttttaattatagaaacatcctaagttcaaaaagtcagacaaaggtcagacaatttacacataataaatggcatgaagtagataggcaagaaatactgagattatagaggtaagaatattttattaagtgaaattcctcacatagcttttaactatgacattcactatatttctgggccagagattttacaaataatgaagtacttttgttgtttcaacagactttaccacaaggttctggttttgtttaacgttagtgtaggacaaattaagactgtccagtatatgaaaccttcaaacttgagaatatataaacagtacagacattatggaccatagtactcactcaggaaactaattttttatgtgatctcacatcatccaagtgcatgactcagttcagtcaaatgcccagaatataaatggaagcaaggctagtagtaacagtgacagagcaagttgttataagaagaacttccaattatgaagcatccaaaaatggaaatttctgcctcttcaagcaggaagtaaatcaaatttgaaaatattagggaaaaaaagcctgggagtcttcaaatgagatacatactttggatgagggatttgccaagatggccattgtgattctagagcgttaaacaaattgtaccttaaaattgtataatgtagacagtcgtgtgtgggccaagtaacttaatgaaagacaaatagagtttcctttttctttgtgtcattgagaaaaatatatatattttaaatttacttctaggaatatttactaattgaaaataattcataaatggagtcaaatagagttgacaatgaatgaataaccaagagtagatggaaagagattagtaaagataagcaattgtggaataatcttatagtacttttgagtgctttttattttgtgaattaaattatgtgaaatgataaatgatttatagcataatcgaaagaagaatgacaccacagcgaaggcccatattgagcagcaagtcaactgctagggctacgcgaggcaaagttggttggcaaccaggttcctcaatagctgtcatgctccagaaaagagccacttctacagcaggttccagaaaaaataaaggggatagattaacgtaaacattcaaataaagaaaaaaaaagacaacacgtaaggcgcaaacgttccctgctagtttctactgacattttttattaacattccttcagtttgttggaggagacagtgatttaccttaaaaatatttcctagcctcacttgaggttgcaggtgaccgtgcgattaggctttagccaatgaaatatgaatgagtgtcccatgaatgagggcttccagaaagctccatgagagtagatttgtgtgaaaagttcattttgctcctctcttttggaataaggaggccaatttgaaagcacaagaaacagtgaaagaagagctacaaggagcctgagttttcaatcaccatgtgcttgcgtgctagctttgggttgtctacttctaaacttaatttatgtgagagaaaaataaacttctaatctatttaagccattgtgttttagttttctatttttatcagttctaagcagtgtcgaattgataagagcacagacctgttatgacatctatggcatagtttatttttctgtttgtgaagaccgtcacttatataaggagaaaacatctctttataatccagtttaccatgtatgatagatttaataataatttatggaaaatgtaagaagaaagtaattttaagacatcaggggaattaaagagaagaatgctttgaacattttactttgtctgattgtaattgaactgaaatgtatttcctatatcttgaaaaaccctctcagttttaaatgtggtcatctcagtttcttatacagtaaatctctgcccccaaaacatttatccaggattttgagaatctgtcccttgtctgtaggacgttaccgtagagagtcctcttcaattcttggttcactctttcactgttcctttttaatccatctaattcattcatcctcaaaaaagcgcttaagcatactgtgtaacatactcagaattatgctaagtactatgaaggaagccacaaaacacaaaacagcatgcgtattcagcttgatgatgtcatgtatctcttctttgaagcttgggtagtactttataacatcaagtaggaaatatttttttaaaattttattattattatactttaagttttatggtacatgtgcacaacgtgcaggtttgttacatatgtatacgtgtgccatgttggtgtgctgcacccattaactcgtcgtttagcattaggtatatctcctaatgctatccctcccctctccccccaccccacaacagtccctggtgtgtgatgttccccttcctgtgtccaagtgttctcattgttcaattcccacctatgagtgagaatatgcggtgtttggttttttgtccttgcgatagtttgctgagaatgatgtaggcaataattttaacaatttgaatagctcagtagctcagtctttacttttttttttttttttgagacagagttttgctcttgtcgcctaggttggagtgcagtggcgctatctcagcaaactgcaacctgtgcctcccgggttcaagtgattctcctgcctcagcctcccaagtagctgggaatacaggtgcctgccaccgtgtccggctaattttttgtatttttagtagagacagggtttcatcatgttggccaggctggtcttgaactcctgacctcaggtgatccacccaccttggaaattagaaatgactcatggaaaattctttattttgtgtccaaggaatcaactgctgaaatacagattaggtgaagattgaattgagaagagttcaattgacccatgtaaaaaatctgcacatgtaccccgaacctaaaataaaagtagaaaaaaaagaaaaataatcccccccagagaatactaaaagcccaaagtagagattttatttgacaatcagcattatacataaaagactgattcaacagctaagcaagagcagtggggagcatgtgataagaacgactcacatttattgaccctttagtaatggcttggcatatgctggtttacctatatgtattgcccatttaataatagacaataataatgtcactgcatcctgtgcttgtcaatcaatgtccagagagtaatatgcaatggtaggtgacagttttaagaaggctgagcaacctatatctagagaagaaggactgcaatgggaaagattaggcatcatggcatttgagatcaggaaagaaaatgagtgagttcggaatattcacaatcagtgggcccagatcataacccaattctatttaatctaatacaagctgctgatctttaagtagctacagactccatcaacttcaaatatctttgagacttgtaaatcttccttgtcattgtattttggaaagtgttgccctgacactggcccaagtaaccacagttattttctaaaaatggcaagcatagttctccataaggagttccaggcaaaatatatgacctagacttttcaaatataccaaagaagattcccttagactttctgacttccagtatgggacattgaatggttaagcaaaacaatcttgtattaattttcttgattcattagaaaagcagccttgtgtttaatatatttacaggggcatagattaggaccatttgttttggttccacctgttaacgttgatcaattatctgttttagcacccaactacataaaagatttacactttctttccattggaaaacattctttgaaatccacacattcattttaggatcttctgtaaagactctttttgtgctatttatagaaacataagtccaaagcactggatgtttcaagcatgaaataacaataatagaaaaatattctaatccagtcattaacacctttaggtgttcagtcagttagattagcatttcattcatataggctgtttttagagtctcaaaattaatctatgagtaataataatatcctaaagacaaacatatatagattgactttcaagtttttggcaagagaagacctcagaataattttaatcaagaatatttcagtccatacccttttagtttcagttatgaacaaaagaatgcatatactatgcatatattttatcaatatgtaatcaattcaacaatgcaacaattattgtactaaagtactgttggaatataatatgatactttcccacaaggaggtcccaacatagccaaagttgatgagtaagtaggggattgagttaagaagtattactttggcaaaaaccaaagcatacagactaatggatacctatgaaactagattctttttgtcttctaaatggctctaaaggcaaatccaaaaaggaattcccaaaattgtttgtgagttgagcattattgtataagcagaaacgttttgtattaaaagcattttgtatatgcagaaatatacaaaaagcatattgtataagcagaaacattttgtattaaaagcattattgtataaacagaaacgtttaggaggtttcaacttaagatgctgttacgctatgtatctaagagaaagtcatttctgttttctcattctcatttttctcatttaaaaaataaagaagtaagaatacatcatctggctgggcaaggtggctcacgcctataatcctggcaccttgggaggctgaggtgggtggatcacctgaggtcaggagttcgagaccagcctggccaacatggtgaaaccctgtctctactaagtgtacaaaaattagctggtcatggtggcccatgcctgtaatcccagctaccccggaggctgaggcagcagaatcacttgaacctgggaggcagagtctgcagtgagccgagatagcgccactgcactccagcctgggcaacagagcgagattccgtctcaaaaaaaaaaaaaagaaaagaaaaaagatctgattaacatacttttgaactgtcttcagctaacctaaatcatttggagatgtgttttatgtgttagaaaaaaaaatcctcaatgataaagactaataaagtatctttaaatataaatatgttactttttatgttggaatagttattctacatcagggagtgtgtgtatgctaatgtgagccctatcaaaggatgacaataattcagttctttcatttcgactccaactttccactaggaaatacacccatgttcatgagtcagaagaagaagaattttaaaactatgcatatcttactgtggagatccagttcattaaagtaaagaacaggtaaagagctgaaaatggaatggaaagaaagcaaaaaagtatctgtgttttctacttaatttatccactgttaagcccatcattttaatctatgttctagtaagaagctatataaacagtctgagaaacaaaccaacccaataaaattgatcagttcagtcccacacagatattttcagaaatctttgattattctaccttaaagcactttgtctacttaaatggtacacaacagtaaatgatacacaagagggagttgatatatattattagttacactttatagaagaaatattattttccagggcagcaacccagactctgcagtaaacaccataaatcaaagacaccataatgctgatcagaagctgtccttaagccctgttgacaaggctgagtactatagagtggattaacttcttccaccattgcttgttttagctgtccccactccatgttcagatagacactctcagttcaaacaggagtgagcaaaaatatattgtagattcaaccggtggaaaaataactttacagcagagtttcattttcagtaggaccatttttttctgggacctctctgtgcacacaattaaatgaatgctccttgattaaatataaaacttctgggaaatggtcgtttaaatggcataattttatgtaacagatattttaaagacaagtaggacatttagttcatgataaaatagggacactcgattaaaccatcaaattataagattttactatgtaacattatctggataattctttttttttttttttaagacagagtcttgctctttcgcccaggctggaatgcagtggcatgatcttggctcactgtaacctccacctctcgggttcgagggattctctggcctcagcctcatgaatagctggaatcacaggtgccttccactgtgcccagctagtttttgtatttttagtagagacggggtttcagcgtaatggccaggctggtctcaaactcctgacttcaggtgatcagcctgcctcagcctcccaaagtgctgggattacaagcgtgagctgctatgcccagcctggtaattcttatatgaaacacaggaactatccatttcatataggccagactagtttttcccatttaaaatgagtatgtgctttctgaatttttcatctgcactttggtattattttaacttgtaaattagtttttgaagcactaccattcctatcccatgacttggagttaaaccacatgtgccctttttggctaataatttacacagctaacatttcaggttgaatttacgtgagtaaaagtaaaacagcatttttccattcttttcaaattcattccgataataaaatatttaaattctggtaaatgacgtaatgggaaaaacaatgttttctgaaattgtaatggtagaccttagtgctgataacaaatgtgtccaaatatttcacaccatttcagatagacatgtgcatttatttggaaggctgagctgttattaaaaacccatctattgtcatccatgtctcagaagagaatgccaatggcaatttttcccatattttgaaaaaactgaagatgtatcacttttaatgtcctacccaattgcttagaaaggaagacatctcttattttttccatattaaagctcttctcatggggacaattaaatgtgcataaattcctcagagtttttattgcttttgttcaatctgtagtctcaatcagaaatctccttcacctttgaaatacctaatgggtcctgtcactcttgaggtttactgtagaaattataatctgtgcactatttatagcgtgtatctttttcaactatatagacatgtctctgtctccaaaagaaaatgcaaagaataataccatcttccaaataattttttaaccccaaatgttttatgcaatctatcatgtgctgagtatggtcttctaggtcaaaataatacattgctggtaagataatctatgacaaatattataaaattaatttgaacaaaacagtctaattcagagcatgatagctggcaaatacaataactctgtaagctatgatgttcccagtgtctcatttttcccttacatcacacattttgtattcaatagacaaattaaaaaagaaattggcaggtatgagtacatggcagtgaataggaaggaagatatttagacctctgtgtctggcatctattttaagtctgatgtgataccatttttttgcttaggcaaatctcgaagagtatgacttcatgaagaattttttttttttcagttcagacctgcaaaaatctaacttcataaaacaaatgtaagtttacttttagcgctatgccagtggtttcttagatttaggatacataagataatatatttgtcttagacagatttcacaaacatatttaacttcttgatttcagaactttgctgtgaaatagtatcctgcaactatctggcatactaggatgatttccaattcaatttaatcaatattaaatgggaacttaatgggcagctcactagtgataatgtattctcatactcagaatttacatcttacatataattataaattataattcttaaccatttttgagaatgaagaattatgtccttctctttattaccacctcttgcttcctagtctccttccttggcccacactaatctcacttaatgaggcttaactatttcttcagtgttgtatagtatttatcggtcattctcattataggtaatcttattggctaaagtctagatagatgattatgatttacttttctttcaaaattaaaggtatcctaaatctgattgcagtttgccttaactttgttttcttagtaaaaattagatttgccaagatagtactaggtatatttgaagctaaaactcagaaaaaaactgattcctatggttacttttgccagagagctgtagtgatttgtctaatatttcaaaatgattatagaagcagttctaaagattatatttgctaagtcttggaaacatgcacatttttcttacacattgatccagtacctagtagtttggttctttcccatcattagcttataataccgacaaaataaaattgtgaccaatgcacatttgctttctcacaatgtttctggtatttttagagaagttaataactaccattatcaccaaagtgcagttgacttcaattatgtgacaatgtatttatcaaaatagtgactcctcctgtgagaatgaactacatgaattcttgagtttgaaaaataatatactgagtttcctggtcaaatagaattactcaaagtaaaatatggatgagaatttaaaagtgcatatttttaacaaacaaatgcatgagctatgtggtttcattccaagtgtttcagtagtcaaataaacagagagagttgttcaaacataaacttatttgttttgaattttctttcaattcaaagtaaagcaatttaaagcaagcataattacatatgaaaaatcctaccaaaaaggtagcataggcaataatttgaattgcatatttccagttgcctaagttttctatgtgaaaagtataaagaaagttgaatagtttatgcagaaaagataaagccatgagtcccttcattcatttactgattcagtcaatgttaagaaagtatttatgtgtaagacactgttttcagcacacaaaaacatgcaaatacacataaaatatgaccccatgcaatggtggagactgcacctgggaacaattagaaaaaaagacactaaatctagcctaggtatgaggaatcaatcagttcaggaaccccttcgaacctaaggtgaatattgagtgcatcgtagtagactgtacctggagctgaccagcctcatgtcaaggggaagcaagaacacggaggacagcacaagaaattgcactaggtaaggaaaatgctttcagggaagtgtaagaagttctgtgttgctaaagcttaaaatatcagcaaagattggctaggagactgggaagttagctgggagggccttacttacaaagatgctagaaaatacagttctttatgggaaattttaaagcaaaaagaagttgtagatatatagaaaaaaaggataatgcactgcttctgaatttctgagtggagatagtatagatttgagttaaacagagtgacaagtcattccagaatttttttaggtaaccaataggaaatcgttcacaagtttaagatataagtgctgccacatatattgttacatctttttattaattactaattgaagtccctgtttggcagaaagtatagactttcctccttgaagttccccctatggttacaagaattgaacaatagtgtgtatatatgtatgcatgcatctctatctatctatctgtctgtctatctatctatctatctatctatctatctatctatctatctatctatctctacctgtctatttctttccctccctatttatctctttttctctctatcacatcatatgtccagcaacaccaatggtttttctgtctaaaaacaatcatttctaattctaaatgtggaatgaaagccaaaagacagatatctgcaaaatccaacctgtttattagcgcttttgcttcagttgatacactcagggctgcccttaaggatctataccctggaaagagcagtaaacagcactgatgctcttgcagcgtcccaaaatgagagatcttttggttcatgctccaatggccatcctttttttctaagcattctcccaaccaggagggagggattcagaggagctacaacctgtgcagaaaccagccatgtactatggctttcaaacacagccatatgctatgcagacaccagccacctatgcttcgacctttgtgtagatcttgtagaaccagctctgaatccctccctccttgtgagaccttcattaagtaccttggtatcattttttttcttttttctaccagcagctaagttgaggctatccctctagattctcctaactaaaaatacttaggaagtcaaaattggaatctcagtgacatcacttccgggaggtcctaagatcctcatgctcacctatttgtctccgggtcaatgaatactaaaggacatcctaattttcaaatgtctattttacacttctctcagtgtattcgttgcttggttgtgaaaatacacagaaagcataagaattctaaaaagctactgactttggctcaaacttgatcaccataaccactactaacaattacaataatgaatataattttactgttagtagtgtgaagaagacacaaattcagatacaaacaatttaaaggagaaaagagattacatcttcaaaacttcttcacattttgcacataacatcatctaatcacaggagtgacatcaacatatccaactcaaaaaaaaggagttacacaggatattatacattaacattacagggtgagtctattagaggctctcttagaattctgcgtactgcaatatctacatcattatagcttcatatctatctatctgtctatctatgttttaagtattaccagttgattttattctagaagaaaataggtaatatgcagctacttccacctctcccctttctctcccattctaattgctgtaattacttttaattcatcatagtttatcatttttcactttattcttgaggtaaaatgatgcagttgtttaatcttctatattcaaatgaaattagtgcttactgtcagcatttttatcatttattctctgcttttaacttctttgtcttgatctcttggttggctggatataaacatcaagaagtttatgtattttaaatatatattaaatttggaagagctaatatttcattttgccttcttaactggataacattttgcttggttagaatgtattcttggtcagatttggttctcttctgaattttatagacagtaatctaatttctctggcactgaaagttgcaggggagtccaaagctagcaagatatttatccctcgtgggtgacttgctctatttttactgatacttaaactagtctttctttatcattgatgttcaaaaacttaaccagaatatgctttagtgccaattattttatgttttttctttttctaacacagaagaaaatgtgtgaattcattttctccttggttccagaaacaattgcctgtattatattcagaatagttctgccacatttgttggatactttatattaaggatgccaaggattcttagaccatactgtttttatcttccgaagctatcatctctgtagttgtgagaatcactatttttttctttattgccattatctcagttttcaacatcatgacattaatgaaggttttggctatcttattctggtttctatatgttattaatgtatttattatattttaataattgctggttttttcaaatattttatggtttatgaaataatttttaaaatagtgttttggaatgtgttttattgaattttcattaagttttttaatcatttaaagtattcatagggaaactatttctctaccatgtaccaggggttacattttcttcaagattttggtcatttttaaacagaatttttatgtgtatgtgttgtatgtcttgtgtttatttattcatgtgtgtgtatgatgtttgcatgtgtatcagaactttcctttttatatagttgttgacattgaacaagattctctttgctgaacatccttgtttctgccctggtacacccaaactttagttggtctttcccactctggacttgcatcttgcactttactagcatcttgggagttgatttcttacctccattcttttctctgaggaaatagcagtgggtgtagccagagagcctcagaaaccactttcagttcttgctaatggacatttattcttgtctttcttctggggtctgaacatcctgtgccagtgcccattccaagcagtgaagagtgcattccgtccacttccaccacgggtttattctcccctggcagcacagccaacctctggggtggtcttgttatagaagtgggtgggtctactttgatgattcttcttggttttccacacggtgcctatctgcctgatatggtttggctgtgtccccacccaaatctcatcttgaattgtactcccataattcccacatgttgtgggagggacccggtgggagataatttgattcatgggggcggtttctcccatactgttctcgtggtagtgaataagtctcgtgagatctgacggttttatctggggtttccgcttttgcatcttcctcattttctcttgctgtcaccatgtaagaagtgttttttgcctcctgccatgattctgaggcctcctcagccatgtggaactgtaagtccaattaaacctctttttcttcccagtctcaggtatgtcgttataagcagcgtgaaaacgaactaatatacaacccctttccatcccttatgtattctccttccccagaactaaaactctaaataaaaattttaatatttttctctttcctggactgtttctggagtttttaaagctattataaaaagtaccagccttttttttttcttttttcaacccctgttttttacaagattgtggttagttgctcacttttctgcaggtgtgttggtgttccttcttccttcctatcttttactacctttgattcgtttcactgggttttggagcctgctatactccaccctcttcaatggtcagtttccatggtgagagacagaactagctggatttcctaggccgactaagaattcttaaccttagctgggaaatgtgaccgcacctacctttaaacacggggcttgtaactcagctcacacctgaccaatcaggtagtaaagagggctcactaaaatacaaattagactaaaagcaggaggtaaagaaatagtcaaatcatataccgcctgagtgcacagggggaaggacaatgattgggatataaactcaggcattccagcagggagtggcaaccccctttgggtcccctcccttgtaggggagctctgttttcactctattaaatctttcaactgcacattcttctggtccgtgtttgttacggctcgggctgagctttccctcgccgttcaccactgctgttcgccgccatcccagacccactgttgacttccacacccccggatccggcagggtgtccgctgtgctcctgatccagtgaggcgcccactgccgctcccgttcgggctagaggctcaccattgttcatgtgcggctaagtgtccgggttcgtcctaatccagctgaacaggagttgctgggttccacagttctcgtccatgacccacggcttctaatagagctataacactcacctcatggcccaacgttccattccttggaatccatgaggccaagacccccagttcagagaataaaaggcttgctgccatcttgggagccgcctgccccatcttgggagctctaagaacaaagacccgcctataacaatggtatgctcttcattttcaaagtgctccaacaactcttgctgaggtacaggtgagttggcgaatctttcaaatcactttcttgctaaccagccaaggactctcatttagggccctatggcctgttgatttgtgcttattatatttttgaagtttttaatatttcttaccatcttatccacacctcttcctgcactacactgaactcccataatataagctcgattaaggcaacaagtaagtgtagttctgttcacttagcagagcttaccacagaataggcacccaataagcatatgctaaaggaatgaatgaataaatgcatcccttgtgaatcattatcatccaaagtacatatggtattatgttataaaaataaattaaagaataatagttttttgttaattggcttatgtaagaaaggttataaattgtcttgcattttcttatactaaatggaatgtgaagttactactaagagtgtctttccagaatttgaataagcagttgtgatactaatccacattatctcttcaagacacctgacagtaattacctccgtgataaatttgaagaaagaaaattgctttgttatcttgagtttaagaaactgataaagaattaaatgaatttaaatggaggatggattttctaacaccctgacactttgaccactgaagtgctcataccatgtgagggatctgtggcctgaaagcaagaaagcttttattagtgatcctttaaacaatataaggtttttaaccctatccctttctacctaatgacatttttactaccacaaatgagaggggccgaattgctcagctcatgtttgatgacatttatatttacttaaatttatttatatatttatttaataggtgtgtcaagcacctattagtataagaaaatgtgctaaaacaccaataattttaaaagatgggcaatgcatagccctttctctcaaaatatgtggcttaaaagaaggcatcaattttaagtaattcaaggtagaacaaaataaacaccataagagagttcaaagagggagggtgattctaaggacgaaacagtcacattagggaagcactgtggtttagtaaaaaacatactcagactttggaatcagagaggcctgattctcctgtttatgacataaacatatgtggccttggtaagtctcagttttcccatgtataacatgagagcacctatatgagcctgttgacaggggtttttcagccaacatagtcttgtactttattcttttgactccaaaaatggtaaagagaaagaagatctatctaacatatcattggtccacattctctcagagtgatcattctaaatccaaagctgaaaatgccattgttttcctttgatacctttcatagttacacatcttcttctgctaaagctcaaataatttaagataatgaacaaatctctccatcatccagtacttgagtgcctcttgaatcatgtctacagccactctttgttatgtcctccggataaaagatgtactagcctgtttgcagttcttcagacacatcatgagccttccatgcttgcatatgttatgccttctgttgaaaaagctaccccaatttagcaaccagcaaatgttgtatcctccatagattagtttagaacttttttgttaaattctgagcttttctcttcccccatcaaagcatccactcctcactcctatctatatcactcccattagcatatacatactttcattttagcatgtatattgtcatttattacatttattaatttagtatctgtcttttttctagattcataatacgtatgtgctagcaatatatttattgatatgttctttgtcccatgagactgtaagatttaacaagtaaggttttatttctagcttaactttaaatttccaaagagcctaatttctttttgaaaaaagaaagaaacaatcaatcaaccaatcagttaatccatgtagcaaataggtaacatattgaatatgcttctgctcatctagaatagacagtgtacctccaaatacaatcatgagcctaaagaggggtgaatggatactatggtttggctgtgtccccacccaaatctcatcttgaattgtagttcccacaatttccacgtgtcatgggagagtcccagtgggaggtaattgaatcatgagagcaggtctttcccatgcttttgttgtgatagtaaataagtctcatgagatctgatggttttataaagaggagttcctctgcacatgctttctctcttgtctgccgccatgtaagatgtttcttgctcttctaacatgcttatgaggcctccccagccatgtggaactgtgagccaattaaacctctttcctttataagttacccagtcttgagtatgtctttattagcagtgtgagtacagactaacacaatggacaaatatttcatagtgacccactgaccattgatatcatttggatctgtgtccccactcaaatatcatgttcagttgtaatcctcaatgttggagctggggcctaatagtaggtgattggatcatgggggtggattgttcatgaatgaatggtttagcaccatccctttggtgctgttttcgtaatagagttctcatgagatctggttgctttaaagtgtgtggcatctttcccttctctctgttcctcctgctccagccatgtaagatgtgcctgcttccctttgccttccaccatgattggaagcttcctgagacctccccagaaacagaggccactatacttcctgtacaccctgcagaattatgacctaattaaaactcttttctttataaattttttggtcccaggtatttatttatagcaatgcaaaaactgactaacaaccatcatcttgagtttccagacttgtgcttgtaaggatgcctctcagctggtgtacataaagagctatcaagaactctacctcaagagtcaccttgcaatagacagaaatatttttccttaatgtcaaaattattctttactgccatccaatacaatcacctcaccagcaacaacaaaatgtgtttgcacatctatgtgttttaggatagaagacataggaaaagcacaatttgagatgaagttgcagagtcagtattagaactatattccaggaatagagtcagtaaattctttaatgtgcttctatactgagaattatttctcttccttctattgactgtaataaaagaataataagtctggaagcacaagagcaaggataccaacacatataagattaactgttggtaccattagaggccccagcacagattaatgcctgggtgttataacacaatcagcggtagagaggaagtttttcaaatcaaagcactccatttgttttcataaacactgattcactttaaaaattgatcagaaaacagattggtcatgaatgtcatttaagattcagaggaaaacacagtaccaaaaaccaagcaaagagaagagccaataaaccttattacatttagatgtcctttctaaatcttttcctccctctctcccttgcccctggttcctttttctctctctctcccaactagttatggtgagaattcagcattgccatgatgccattctaaataaacattgacataagaatgagtcttgttgccaatactctaatgatcaacacaagaaaccaccgattaaatcggtagatacacaggtgttaatccccagagccaagtccaactctgcatgttcaccaacattgagataagtgtgtttcttgagatattactgctcaaatgaatttagcaagtgccaatagaacgtttttttccattctaacaaaactttattaacatagtaggtcttgaaaaatttaatatgcaggttttctctatatgaaggaaataacagaaacattagatattgcaatatttcctaattttcacgtaccaattatttcattttagataacttttgtaacactgtataatattcattttgtcaacataaggtgttgaagtgtcaaaagtattaagacacaaaagtttctcaaatatttctcccacatgtaaagtttctggttctgaaatcaaatatatttcagaagtgtggggttttaatcctatgcttttctggcacatattttgcttcttgtttccaagtttacataaaacgattattaggaactataattctgaactatattgttcacttatgaaatgtattgattattcttgcttatgcatactgaaacatccatttaattgttcaaaaactgtgaaagatattttaaaatgtttatttctatttgaattatagaagcaaaaaatatttgtcattaaaagttatttaagaaaacttttatttaggactcatcctaatgaaatccatttaaaatggcagttatttaaaaatagataccttagttcaggtaaaaagatttttcttctcatttcaaaatgctatagatggcaatgagtcaaaaagagtcaagataacaaactgttctttgcggcattagagaagaagaaactccccttcatgatattaagaaagtcattaagttaattaatattcagtacataaaaggactgaacagatttaaatgcattttgtggcctcatgattttaccaacacttagtcaaaaatatgcaacacagtgaatttgaaaagtccccccttcctcctcctattttttctttttcctttttttaaatctcttttatttttcacaaaagaataatgataattaataatattatgagtatcagtaattgagcctttattttttaccgcacactctgctaggcttctcactggtatcgatgcttctcctaccaatgcttcaagtcaggtcactgtgctggatttcttttctttttccctctagatctactacttttttttttaattcccctctgggcatcacctggctgacccctaaggtctacaacatcccttgctctttgggttccagttggtctcacagtgggaagctctgttgagagtacagagagcaagaggtgagtgagaaaatggccattgatttcttctctctctctctcttttctttgttccctgtgtgggctgtgttcctctactgagagcactagctcccattaggtgggaatctccctacacccaccttctccaaggcagtgacaatgcttaacacttaccccaaactctttaacagctttatattctttcattggtcctgggcctcattcctcctgtcttctctcagcatctttgccttcctaaattcatcctgtgctgtggtttctttctccaaacttctttagtggatcttagtgatacagacagttatcacaaatatctcctttcttattttgaaatgtgtagcatatatcctgtctgccacttgaaaccaaagcaacagccctttttttttacatttaacatatttaatgcagattgaaatctgcacaagggatcatgtaaccttcttcagctatctacttttagatctcaaaacttctgatttgacacttacatcctcatctccccttcaccatgcactcttagagattaacctgtgtattcagctaaaagtgattaaagtgattaaagtaggttcttgtatttcaccgcaaggttattgaataaattttgttttacatataaattatattttaggtatttattaccaggatcaaattttgttttgggaaagtttgatgtctgtgttttaatctcatgccaaaagcaaataaaatatcgtggaaattattttgatattacttttactgttaattgcaaatggaaatcaaagacaattggaaaaaaatttggctataaatatatattcctatatcaagaatttaaaatataaacttataagccagccctaccattttcaccttcataagcttttctttttgtctatttttgatctatttaattagagttttggagggaagagcagttggaagccttgaaacttgaaactttctttttctagaaaaaacactgatttatataatcttaaaaattcactcccagctcctcgggaagctgaggcaggagaatggcgtgagcctgggaggcggagcttgcagtgagctgagatcgcgccactgcactccagcctgggtgacagagcaagactctgtctcaaaaaaaaaaaaaaaaaaaaaaaaaaaaattcccagttcatcactggccatcaggtagaagggagtgtggtggagataatttaaatgtaaaagtttaggtgacttgattttgtgatgattaatcctagaaggcttacttggctttcttatagcctttgacttttagaaaaacatatagtaacattgatgcaggatttttcttggaccctttgccagactcacagtagggttgccctctctactcggaccccggcactcaaccccttgcaggagggagcatgtgagtgagctggtgtggaattcagcaggccactccagcacctacacagcaacgagctccatgcagggcctgtggccagcccaggtatgtcacctcaaggggaatgtggtggcacctagctgacggtgcctgcaaccctgaagccccagagggggtgttacagtgttcctttagttccactgtttgcagatggtggtgtgttagcagcttaattggccccttgcttcattgtgtggggcagctcccctctgttggcaagggcaaaaggctggtgtgacagcctttctgggtacccgcactcggtgggtcccaagctcttgtctggtgtccaagaagaatgaggtcacacagacggttgaaggatggtgaaggtggaaaattttattgagcaatgaaaatggccctcagtggagaggggagctggagaggggatgggaagggcaggtcatcttccctgaagtcaggttgtctcttccctgaactcaggtcatcttctcctctactgactgagtccagggtctttataggcacaggaaggggagtgcatgctgattggtttgtgagtatgcaaaaaaggttcaaataaaaagtatcactcaaaggtgggcacaacagtgtagaaaaccaattaggaaagggaaggtatatgtaaaataggcgaagggtgggcatcaatcaggggaaaacatgccaagcaggaagacaagttctcagtccattctgaagatttaacttgtattttggctttcaggctttaaactatcttcagcttggtggtggggtttcactgggtacccacccctatctacctaggcatttggctgcctcctgtcactatcaatatcttattgatactaaatattattttcacatgtagttcttagataaaatgtatgtaaaatagtgtgcttgaacctgttgtgttagcaacatgctaggagcaagtttagccttacaagctttacaaaaataagtttgttcgttggatttaatatagcacagaactgtatttgaaagcagtagtcagaaaggaacacaacccagggagaagtctggctcttatcacaaaatatgcatttcttgaaccaatccatcatccaaaaatggaaagtagagacaataataaacaagaaggcttgatggccatttccaagttcaagtttctattacttgattgcaattgagtgggcattactgtttctccagattattaagcaagaacaaaattattatattattatttctgaatttttgagtggtgactggataaacaagaggcattaggaaatagagttgcttttctttttttaatttacatttatgctggtagtagataacataatttgttggtatattgttatttattttaaataaccatattcatattcagaaagcatgtgaggagtaccttgtattgaacatttattaaaagcagaatgttgtcaaaatttaggggatttaattgtaccatcaaattgtactcccaaataaatattacagtacaaaataaacccatggataatgaaagtaaatacagcaaaaggggtaagaatgaatgggtaaatttcatggaattttaggaatccatgaatacataggcacttattaattgttatttgtataacaaattcttaatgaaagtgctttaacaacaatattttaaaagactgcatttgttttactgtgtaccaaattacttccagttttagtggcctgaaattacagttatttattatttcacagcttctatagatatggctttgttgggtatctctagctccgagtctctcataaagttgcaatgagattgccagccaaggctgcagtcatctcaatgcttgaccagagaaggatcaacttgcaagctcactcccatgggccaccacacagagcatacaacatgacagatggcttcctcagctagagggtcttaagaggcagcaaatgagaggaagtgacaagacagaagccacagtcattttataacctacacttggacatgacatcccatcacttttgtagcattctattcatattctatttattagaaatgagttaccaggtagagtgaggtgaagtgattaaacaaggcacagataccagaaggcagagatcactggggatcatcttacaggcttcctgccagaaaaagattaacacaaaatgatgcactgtgtgaaattactatactagtcttggaacactaaattttgataatggagattcaatcaagcaacacttttaaagcattaaatggctaatcataatcattctaaactcagaatctttacgttatttagacattaaagtccaggttaaaaaaagaaaacaacaaaaggacattattgagcattattgagttaaattgctcacgcccccacagtcactctgtggaccaagaactatggctgggcttattttaggatgggaactgaagagtaagagtgtaagttttcagataaaataggacccttaaacaattatgctcccacactggtttaactggatcttaacaagtttaactggatcttgtgtgttagcgcgtaggtgtttataagcataatagtgctccccaagggaaaggtaaatttgccatcacttccctaccaaaatggcctggtactttcttacctgccctaaagtcatgcttcttttcaaactttgaattatggaatgccagaggccacaaagcacaacttatttctttcaaattgtaaatctaaacctcctaggaaaaaaaaatgggcattaatttcattcgtgaacatatcccataatgagtctataacccagttattttgtccttccaactttattatgatgttattctattttgttttgcactaatgtcaagaagcattttattaaatcaaagccaagatttctagttttcttttaaatttttatggggtgcatgccatactttgatacagatatacaatgcatacgaatcacaccagggtaagtatggtaaggaattctagttgtaatattaagcccaaattatttctgcctcaataagagtgacaattagataatttctcatttttttcaaaaaactgaaaatcctatagacatgtctttcctttttgaaaagaaaaaaataggggtagtcatcttatattgattatattgtaatattctgatttgtttttcagagcaataaggttatatttgatgaagagttttcactgtttttttttaaaagaaatggtggatgcttttgtgacttaattatttttcagatgttcatgttccatttagctaagacataacatgatcatgctcagaactcctgctgttttggcaggaagtggaataaaaaacaaagttttactaacttaaaacagtttctcttggcctttctgttgacttattttatttcttgaattattttattttgttgacatcttgaaaaggagtgattctgaattaactgaatttaaaaagatatattcattcatttttaccttgtgaaaccttccctgtatggatgaaaggtagaagagaagacaaaaaaatagtacattcagagactgactagttatcttatgtgaaacgtaaaatcaaatcttgttaaacaccttgcttggtcttccaatggccttcctttacatttagaattaaattcagtgccttcatcatccatccggttctatgtgtcctaatctatgtcttctgttccaacattgtgctttgctattgtggctcaagccactcaggtctgtgtttttttttcttccaacccatgaatctcattctaccgcttaggacttttatgctcactgctcccctgtctagaaaactatgactcattctttctcctcattcagtctctaattagaacagctttccactgtgacctaatctatggtctaaatctccactaaccacagtagctgggattacagatgtgcaccaccatacctggctaatttttgtacttttagtacagacagggtttcaccatatcaaccaggttggtcttgaactcctggcctcatgtgatctgcctgccttgacctcccaaagtgctggtattataggtgtgagccaccatgccaggaccaagctatgttttcttgaccttctttcttttcccttccatgcccatatggaaagtaaacaaataatccactgcttcaatatggttttgctttgtttctattgaattacactctgttgtttttatagaacatatcactatttggaaattaatgtttgcttgggtttgtgtagttatttttcagtttatcatgtgcctctcttgctggaatgtaagctacaatcatatagggatcttgaaaacctgtactttaaaaaaataatttcaacttttattttagattcggtggatactggtgcacgtttgttacatgagcatatggtactggaggtcctagccagagcaatcaggcaagagaaagaaataaaagtcatccaagcagaaagagaagttgaactgtctctctgcttgtaacagaaaacccgaaagactctgccaaaaggctcttagaaccgataaatgccttctaaagtttcaggatacaaaatcaatgttaaaaaatcggtagcatttctatacatcaataatgtttaagctgagagtccaatcaataacacaatcccatttacataagtcacaaaaataacaaaatacctaggaatacagctatccaaggaggtgaaaggtcattacagggaaaactacaaaacactgctgtacttttaaagcaagcagtaagcaaggctgcactttggaggtgtgaggtgtggagagatagtgcctcatctctcaaggttgttcactgcaagtacaatcctgagaatggccatggcccaaaaacacaaagaagcaggagatattgatggcatgtctccaaacactgtgttaactcccttcgctgaggaagaagagaaaatgtttctgttgaaaaatgtctttttctacttcctatgtaatgcctctaatccaataattaacataattttataaattatattttttgtgtttcaagattatagacttcggtttaagaatctggtttttcatagctctttttgtgagaaaaatacacacacacacacatctccacattacaatgtgtgtgtgtatgtgtgtgtaaacatttatttggtagcttaggcataaagtatggtttttccttggcatcctcgggggactgcttccaggaccccctgtggatgccaaaattgaagattgcttaagtctcatataaagcgacataatatttgcatataacctatgcacattctcccgtatactttaaattaaattatgtctagattacctatagtgcctaatctgtaaacagttgttatgctgtattgatttttttatttttatttttaattattgttgtttttaaattttattcttatttttctattttattttattattattatttttttgagatgtagtcttgctctgtcgcccaggctcgagtgcagtggtatgattcagctcactgcaacctctgcctcccgggttcaagcgattctcgtgcctcagcctcccgagtagctgggattacaggcgctcgccaccacgcctggctaattttttgtatttttagtagagatggggtttcaccgccaccgcacccggccgttgtttatttttatttttttgctaattttgatccatggttggttgaatccatgaatgtggaagctttggatatggaaggtggattgtactgcagtttgaaatatagctaaatttttagaaggattttaatataaaattctaaagcagaactataatgcaggagactgctcatgtcctgatagaatcattttcaggttatataatctgttcaaaatacttgttttccaataaaaggaagttgttttccataatcggttttttggcagaagtctcatttattgtagtaatctgtacaggtatttatttatttatttatttatttatttatttttgagacagagtctcgctctgtcgcccagactggagtgcagtggcgcgatctccgctcactgcaagctccgcctcccgggttcacgccattctcctgcctcagcctcccgagtagctgagactacaggcgcccgccaccacgcccggctgattttttgtatttctagtagagacggggtttcaccgtgttagccaggatggtctctatctcctcacctcgtgatccgcctgcctcggcctcccaaagtgctggattacaggtgtgagccaccgggccgtcctttatttttaataaatattatcctctgctattatcaaatatttgggtgagcactctaaaagtataaattgttaaatgaaacagagtatttgatattactttttccatattactagaacttataaaaagaggttagaaatttttttgtgtgtatccttatattactttctaattttcttttctttttttttttttcttttgagatggagtttctttccctcttgtcacccaggctggagggcagtggcgtgatctcctggcttactgcaacctccaactcctgggtctatgcgagtctcctgcctcagcctcccaagtagctgggattataggcatgcgccaccacgcctggctaatttttgtatttttagtagagttggggtttcaccatgttggccaggatggtctcaatttcttcacctcatgatccgcctgcctcggcctcccaaagtgctgggattataggcgtgagccactgcgcacggcccactttctaattttctcttggcatatcatagttgtataatcacattatacagcacataatatctagagcctgtcatagtttcaaatttcaaacattgccatatattagttctgtcaccttggtcaatttatataattatgcctccattttttcatctataaaatgtaggtttcttatgtgttattgcaagaaataaacaaatgaatatatgtagaatgtttagaacagtgccaggcacaaaaataagaaacgtataaatgttagctagtattattatagcaagcaaattgtaaagtccacatttttttttttttttttttgagaaggagtctcactcttgtcacccaggcaagtgcagtggcacgatcttggctcactgcaatctccacctccaggattcaagcaattctcctgtctcagcctcccaagtagctgggactacaggtgcctgccattacacctggctaatttttgttttttttttttttagtagagacagggtttcacgatgttgatcaggctagttttgaactcctgacctccagtgatccacccaccttggcctcccaaagtgctgggattacaggcctgagccacctcatccagacataaagtccacttttcatgttctcacttgaatctccttaagtttctgatacagagttcacacagtaggtcgagagcaaaggctgttggatattttacaaaagaacactaaataatccattttaaaagatgtttaccagttgggtcttaccagatctccatggagtgcataaatgttatttgaaaagctagaaggctcttccaaaatttgagcaatatactctacccaaggacaaaatgaaaaattattaaacaggtatttgatagctaaattgggataaagtctttataagaacagtaagaggtttgcatctaattatgctcatttaaaaatccattacttaaccattaattagacaaaaagagaagaaagagtatgacttcatttttatctaattaataggaattttggaatgcgcagttccagaaaagcttatctcctagagtgttatagtcatcactttaaaattaattatttttaagtcaaagtgatgagaagtgcactacaaaaaattcaatgtttgttttgactaaagaaaatattatgaatataataatataatattaaaaacaaaccaaatacactaactagcatttagaatgagtgaactttcattatttcccagtgtatataatggcaaacttgcacagtcacttgattttatagaaaaaaaagaatataaagagttctgctaatttcatgtgccatcgcttattttatctgcattaatttaaagatatagtctgcctgtgcccaataaaaacatctgtattgcaaaatttaataatttatattcatatattcgtatagttgtacttgtctttgatgaatattatcactgaaaaaaattgttgagtgatctgtttctttcccttttctttttgttttctctttctcacacacaaacacagaacactcaatcacatgtttaaaaaaaatgaatcagtcttttctaatattttcccttatctatttaatcctttgtttaaaaaatggctataaatttcatgtatttaaaagtaaacagacttccattttacatattcagcctgcatttattgaaaagggaacaaagaaagaaaggtatcacgtagttgcatgctgtcaggtaacatttttataataattcatgtgattccttttgtacatatctattcttgagttgattgtattcaggcgaacctgagtcacttctgttaatgtcacaatgagggctgagtccattaattctacttcactacacactgagtctgtgatagggatacaactcctctttctagctcatcttttagtaaacttttgttattcaattatgacacataaataaaatgaacagatcttaaattacaccttgatacattttacaaaatgaacaaattctttaaccactaaaatcaaaatagagaatattgtcagtactccagagtccttccttcttgccctgtccctcactaaagtgactattattttgacttctgtcatcagagattagtttgttcttttatttgaaatttatataaataaaatcttacagtacacacatttttgtatctggcttctttttcccaaaatcatgtctgtgagattcatccatgttacatgtaacattactatagaattctcatccctgtatgatattctattgtatgaatacatcacaatttattcattttactatagatgaacacttgcattgttttcagtttcatgatattatgaataacttgctacaaatatttttagacatcagttggagcacatgtgtgttatatatgtaaatagaacctctggatcttagagtataaacatgttcaaattcattagactatcaattttcccaaattggctgtactagtttttaaattccaccagcagtatatgaaaattgtagttgctacactatcttgacaatattatatattgtcacttatttttaatttttgctattatggcttaattaatattggatttttattttcctaacaactaataatgtacatcttttataagcatattggcatctttttatgtagtttctgttcatatttagtaaagtgctcactcaatattctccctttttctaaaaaattgagttttttatattcttaaatgaaataatgtataagaagtatgtctcttttacctatatatcatatattttatattactcatatatagatacatattctctcaacctatggcttccatgtttacttttaatactgagttttagttaagagaagaacttaattttaaaagtctaatctcacaattctctcttttatggttagtgctttccctcttctatttaagaaactcttgtacaactccagaatcataatttatttatattatagaatttcttttaacatttctaaactgtaatgtggaaacattttcgtgttcattaatctacataaatatagaacataaatatataagtgatctggtgcaatatattgaaaagaccacatttcccttactgcaccttccctagtatgatatcttgctgtaaataagttaattctattcatatgcatctgtttctggattttctaatctattccattggtttattttttctttccttctggtagtacaacaatgtattaagtcttaatatgtcttgttatcctgcaggatgaatcttccaactctcttcttcctcaggattctctacccactttcaaagtccttcaatataatactgaagagatgtggtgataaatgacatcctactctagtttttgatctcaggatgtaagtttttgaaactgcagcattagcatgatgtatacttgtagaattttgaaaataacctttatcagattaaaaaacttcacttttgcttctaagtagaccagggcttctactgaaacaataagaatagctgaataaattacaaaagttgtatttctaaaggaattagaggacagaagaaataatgaggattaaagtgactgaaactccagagagaatagagctgttcaaaggtgaatgaagatgtgcactggccttttccaggttgcatttgcccattcagaattggcagaagtggagaatactggcttcgcccaggcattagtcatttcctggggaataagaagtcagtagaggccgggtgcagtggctcacacctgtaatcccagcactttgggaggctgaggtgggcagatcatgaggtcaggagttcgagaccagcctgaccaacatggtgaaaccccctgtctactaaaaatacaaaaattatccaggcgtggtggcatgcgcctataatcccagctacttgggaggctgaggcaagagaatcccttgaacccgggaggcagaggttgcagtgagccgagatcgcaccactgcactctaggtgacagaatgaaattctgtctcaaaaaaagaaaaaaaaaatccactgaaactctgtctcaaaaaaaaaaaaaaagtcagtagaagttttagtagttgtgcaaagatacagtgacaaaatcagagacttaatggggtctaaaacacagagttggttttctcccaaagacgtgcctcacgttctgaagcttcctgtagcaagagactaaaaaaaaataaagcaaaagattttggaaaacacagcaaaactcctacagtcttggagtgctggagaaacagacacattccccaaactctcacccaaaatcctcaaacagccaagtgttaaggatgaagggtaagccacaaggagactgagtcctaaggactgcaaccaactttacccatgctcaggcctcgattggattaagtgatcaatttccaaacctcttctggtgaaagttacatcatctaatgcctgtattttttatagtaaataaacagcatgcaattaataattattctgcttgtgcaataggagcatatgccaatatcacaaagaaacaaacaaaaatacaagcagattctgtttttcaggttagcagataagaacttaagatacttaagattaatatacaaaagaaaaagaagaaaaggaaaaaatattgactgaaaagtgaggaatttcagtggaaaattagaatctataaatagatttagaacaacagtctagaaacaaaaatgtgacctatgaacttaagaactcaactgataggttaacaatggatcagacacagatgataagagttctgaactggatcaatgtaaaatatacaaactgaagcacagagaaaaagaaaaagaaaagcacataagagacatatagaacatacttataatgtgttaaataacctgtaattagagtctcagaatgaggtggggaatgtaagagggggttagcattattcagagaaaaaagtggctgaacatattatattatctttatgttgtttcttaaggcgtaatagtgaaatagtatgaagtattaaatgatgaccttaaaaaaaatcttttatctgaaatattccaacacagttttaaatgtgagatagatctgagtttactgcctcaaaaatttataatcagaaacattttaagccaaacagcatctctaggatgatttatctgaaacccctttgttttatttctgaggtcacaaagggattgaaagacttgctaaaggttctagagcagataacgcctcaactttccatcttattctatttatggagacactttccgtgaacctgattactaatatgacccaattgcagtagctgggggtgggggaacaagtaaatatttccttgtttactctgtaaagcattcagttatgcactaaaaataagaaagaggatactttgggaaataattctctgactgttctagtttatctaagtgaacctaaataaaacaattattacgatattataaattggctctgggaatctccagctctgttttttgttccattagatatgtaccatcttaccaagtttcctgatcctgtgaatttcttgtaagttctacctcatttctcattctgtttatgtattgacttacagtcctgaacacccaactctttatctaatattgtgttgtctgttattccttctactaaaagtcagaatgtgaatcctggctctctgccccttatcagccatgcaatttgggcaaattatctgcttctgagccttgttttctttatatgtaaaattagcataataaatataacacctgcatagttgaagctcaatttatatcattgtgtgtttcttaaacattaaaattctactgtttattaatcataaaattaatttaagaatgagataagtgaatagtttctaccataggcaggtgttaagccaattacattaaacaaaattctagaaataaagtactttgatgagggctcagcagatacggtccataggccaaatcctgttcaccacctatttttataaataaagttttattggaacacaaccatatccatttgcttacataataaatatggctgctttgctgttaaaaaggcaactatatttgtgtagttgcaatcgactgggtaactcacaaaacctgaaatatttattagctagccttttacagaaaaacagttcactgacctcatcttaaagcattgcctggcataacaatacacattaattgtgtattgtcaaccaacccttttcaaaataatacaaaatccagacttcattatagttcttaaatacttactgataagtttgattggtatttaggaaatccacgccaatttttatgaattctacattaaaagagcattttttgctagtatgctttcctttttctgtgggtgaaaacaaatttctggtgtattatttttaaatttaagagtagtaattatgcacagctgaagtaaatacattttgcataataattaatgatttatagagtctactaaggctagtttgagctattggatataatgtgcattttttctcttaacaatcctcataaatcaagatttactcatattaaataatactaaaaaagaaactcatttctcttttgctgttgtatacaagaacattaaacatataactttcatttaatttcagatagttaatataaaacattgcagaggaaatggatatctattttggaaagatggaggcaattgttgtctatggcaagacagagaaaacacatttctttctacttgaaactaagattatttataaaaggaaaactacctaggagatgatgactgggtaaagcttgtctaaccagagccatggcttcttcctcatgctattcctggaaaccaccttttaaaattgttcccataagatgttggatcatacccaatgtgaaaccatcaaaagataattgttataatagcaacaataataagtgccataatgagtcactagacatctgtatttacatgctgagggattatgtcttagtttctatatccaaagttagggttgtaattattatacataagttaccattatgcccaggtaggacatttaatatacactcaataaataattatttattgaataacaaacagtttaccttgcattataaggaaatctgactagatgagaaggaattttagtaactatagaaatcagtaatgattctaacatgatcaaaacgtcagcatatgtggaacatgaaagttagaagttttattgctctatgatatagtaaaacaaactatggaacaaacgctaatggtgaaaaataaagaaaagctatgagaaacagtatatagaaaaaaatcatcagaagttgatgattaattcagtgtgaagtaatggattaaggaaaatgaaatcaaggaagtcctcattcccactgtatgaaaaaatcatatttaggaataatttcaataaagaattatggatattgagatgatggataattccatgatacatttagttttaatgaagaaaagattatgtcaagctaaatcttagaatttggaagaaggggaaaaaagtaaaacagaaatggccaggttccaaagacataaaacagtgcgttgttggaactgaagaaaatagttccaagaagttccatacaaatactaaacgatcaaaaagccctgaaaaaaaatgacactatatttgatagtttgtatgccacagtcaaccttgttaatatcattttggtaaaataaggggagtggaaaccttgctatggagccagcgttctgacacatggaaatgaaggcaattagggcaaacatatgtttgagaaattggggtgtcaaataaaatgaatagtaactctagagagtcacagcacgaggagtaatattttcttttacaaggtagaagaggccaaaggttttcctacttaagacagaaatagcataaagaatgagcttgcatgtacaagaaagactgagaaaataagtaggaaggagtttaaaaagggggatggaatcttcagcaatcatttgattctttgtctctttgctcacctaatcctctaagttaaagctatttcaccttcatctatggctcaaagtcaataataattgtatattttaaaataaagaatgtgattggattgtttgtaactcaaaggataaatgcttgaggggatggatagcccattctccatgatgtgcttatttcacattgcatgtctgtatcaaaacatctcatttaccccacaaataaataaacatatttacatttatttatatatttatataatatataaaatattagtgacaatgaataataataatatataaaatatttattatatatttattatatattcatttataaatatatatatttatacatatgtatgtactcagtacccacacaaatttaaaaaataataaaaaatctaaaaaggaaacccatatcaggattcaaaactaatattttcttgagagaggacacatatcaaagacaaagtcacccttagaagtgtcaggagctctttgctctgcaattacacatgtatacactgcccagtagcaatggctaagataagcaaattgaaaatggagaccagtttagctttccagatcctttgtgagtctgtttgacctaaggatgtctaatagcatcatggaaataagaccagaggctcctagtcattttggcacgagggaccagtttcatggaagacagtttaaccacagaccaggtgttggggaggttgtggatgattcaaatgcattacatttgttgtgcactttatttctattattattacattgtaatatataataaaacagttgtgcaactcaccataatgtagaatcagtgggagccctgagcttgttttcctgcaactagatggtcccatctgggggtgatgggagacagtgacagatcatcaggcattggatactcataaggagcgtgcaacctagatccctttcgtgtgcagttcatagtagggtttgcgctcctgtgagaatctaatgctgctgctgatctgtcaggaggtggagctcaggtggtaatgcaagcaatggggagtggctgtaaatacagatgaagctttgcttgcttgcccaccactcatctcctgctgtgtggcccagttcttaacatgccaccatggaccagcactagtctgtggcctaggggttgggaactcctgaattagacaatgaggcctctgaaaaacaagattctaggataaattttgataaggttatataattccttcttggtgatttccctttcaattagcttgcctaatactattccatcttatggaatggaggcctactaaatatctaacagtcccattttggaggttttatcattgagaattgtatccagtgatcttatttttggttaacaatggacaccttttgataaggaccagataagttggaaagcaaaaccaacaaacaaaatgaagttgtcaatcaaacaagcgaaataaaggatacttctgtgtggttcagatatctttgtgtcaagacatcattgagcaaaggggatttgtgtcctcagttgaagaaagtagaaaattaaatcctaagaatccaaatttaactaaggatatctactgttttaaaacccattgctctcacaaaattgcaatcataaaacaagaagaaaataaaactgtggtgtaacagagctacaaaacatcagtaaggaaccaagcaaataaaaaagacatgtaatattttcgcagacttcagtcctatgtctctattgcctggataattggtatgaatgtgccagtcagtcaaagcatacatagcatttggtgcaatgacgtctcccatttgtaacataaaaataagattgttattttcataacagatcaccacattgtactcttttaattattagacttaaagcttatattgatctctttgattcctgatccagaagagcctttgcaaaccaagactactcgctcctgtggggcatcagtttttcaggttgataagagttgcagtaccttgaggaatttccagtgctattggcttcaccccttcttcaagctactgacattcttgtccttcattggtacttacgacattgtttgaccaagtggaaggcccatatagttgttaaattcacttctcttcacatctgagccatttcaggtattttttttttttttttttttgagatggagtctcgctctgtcgcccaggccagagtgcagtggcgcgatctcggctcactgcaagctccgcctcctgggttcacgccattctcctgcctcagcctcccgagtagctgggactacaggcgcccaccactacgaccggctaattatttttgtatttttagtagagacggggtttcaccgtgttagccaggatggtctcgatctcctgacctcgtgatccgcccgtcttggcctcccaaagtgctgggattacaggtgtgagccactgcgcctggcccaggcctttttatatgctgaaaaactaaacagtggaagcaaccctatctgtatgctactcctgcctggaactcatgagcaacttccttacctgctaaaaaagagggtggctgtgtctgaggcaaaagtcattgttgtttgtttaattttaattacaagcaaaattaagtctaaacatgagacttagaagccaaaccaaatcgaagctattggaattggcgcactattctgcctgccacatggcagggtgcagtctcaacaacccttccgtgccttacatccttaagaactagaatcttgggtctggctggcattttgaagaaggcacatccaagcagaagagaagcacattattgaaatcagagaagcctcagagccattccactatgataatttactgtctgcacttttaaaaggctaatttagaagtggagtaagctcctagttttatgtttacacactgccctttttcgttattgcagctgaccctttctcaactcgatgatgaatctgagattcttatacctctttccaaataattttaagagacaaaactcatcttcaactgaagggaataaataactcagagatggcattggaatccttactaggggggcttaggtcaggaaaggcaaagtttttctatggtgtgtgcctcaaacataagcctctggctagagtcaggacttagtaatcataagagtccttttcagcctctctcctaacttcacatattagtgcatgcgtttgttacaaccaaaccagactctactgtttcaggatgcagttcattctaaagcttttttccaaaggggatatccaaatctcccaacaggtgcgttcaaaagacctccagtccatactcagatggctttgacctatttccaccctccgagtctaaccactaccctcttcagtaccattcacacctcaaggacattatccgggtagactccccttatttagtgtatatggactggtgttctccacagcacacagagaacttccgatgaattggtctcttcagttacaattcagtctctctctactgaagcctctggaatagtcagtgacttaggatatgaacataaacactgctctgtcccagcttgaggtctgggttcagatcttgcattgggtgactgaaggttccagcctttgcttcctgattaactagaatctctcccagccaggtgtggtggctcatgcctgtaatcgcagcacattgggagccgaggcaggtggatcatttgagctcaggagtttaagaccagcctgggcaacatagtgaaacactgtctctacaaaaaaaaaaaaaaaaaaagaaagaaagaaaaattagctgggtgtgatggcgtgaacctgtagtcgcagctacttggggggctgaggcaagaggattccctaagtccaggaggttgccatcacaccactgcacaccagcctgggtgacagagtgagaccctgtctcaaaaaataaaaaaatctgtcaatgcttggttcttacctagtgctctaaataggttcttgttaacattaccaaagaaggtaggaataagaagaaatttattttcagaatatgaattgatgaaaaaattcttaatcacagttgtcttcagaataaaaaaaataagggattgttattttacaatttagtaaatattccccatgtgtttcagtatgttaaaagaattcagtaaatatcacaattcaattaaatcagcccaggttttatggcggtgacccctcatgactggccaattttaaggcaacttgattaatattcttttattgattcacagaaaaggaaatcattcattggtccctgtgggcataccctataaagcttctgggcgtgagacagtgtgagcaacaggttgtccctgccgctccctggatccaaacaggtctttcagagttgacagaatagttattagagacggcctttcctttccttgattgccttcaactgaatgttctaaagatatagaatgtggtattcacttattctcattaattcatcactttcaagcttaaactcttttattaaagaaaaaaaactgaggaccaggtcaaactgcaattctggtgtttatttgaaacaaaagtcatgaaacaataggcttataaaaatgaaaggatcgtgagaattttagccattctcttcccctcaaaaatgagctgtgtattatctatgtaggatggtcatctagaatttgtgtaggtacttaatttcatcattcatttattcaacaaacatttgttgatctctataaaatgtcaggtggtgttctgtgcccttgtagtcatcagtgaacaaaatagccaaagattactgcctttttttgaagtatacattctagttggcagtgtcagacaagcaaaaatatatataataaaaagataattatatcttattttaggaaaatagttctatagaaataaaaggaagaaaggcagagccaagttaaaaaaaaaaagattgaaagtgctagagttaggtggatagacatggttccatgttacagaagttggtcagggcaagcttaattgggaatggttaagtaaagtctagaaggaggtaagagagaaagccttgagactacctgggaaaattgcttttcaaagctagtaggtgccatacgatggagctatgtctgatgtgtgtgaggaaagacaaagttttagtgagggaatgagagcacagatggggaggtcaggtaggtcacagaggcttttgggggtactacaggtcactgtaaacaaacttagggtttttgctttgttttgtaacttttactttaagttcaagggttcaagtgcgggtttgttacatagatacgcttgtgttatggtggtttgttgtacagattatttcatcacccaggtattaagcccagtacacattagttatttttcctgatcctctccctcctcccctcctctaccctctgatgggccccactgtaaatgtttgttggattttgctggtaacatacatatatgctgcatatcttcttttaagtatcaaatagtacatcatcgaaaataaaatataatttaacctgctgttttatagtatttcctttcttatccaaaactttaatgctgtgcatgaccaaggtcttttgataatagcatattctcatgtgaatcagtaaaactggatcacaatgaacagttttggaaattcttggtaagttggcctcttagccttgaatatgcctatcctaatcccttctgtcgtgttagaggaactttttttttgtttcttcttttcgtgagtagtaatagacttgttcctactggttaaatgcctgagctttcttttttgtaccataaatcataggacagtacatcttcacattatctggaaaaacacactaagaaaaaaacaaaaacacatgcatttcctccatgcccttgaatactttgcaaggtccctggaataacagtactctctgcttccctgtttagtcacataaggaaacctatagatggcaccactgctgccagtagccatcttgctgtaatacgagccaaacttcagaaaaagggcagtgaaatggacttagaatcccagtaaactttgtatcaaaccaaacttagagctcactctgtctttaaatttttcaggtgtaagtaaaatgtttgcttatttttaaagcttctttgaattaagaatattaatacaggcaacatatgtacttctaatgcaatatctaagaacaattgcctccaacaaaaaaggcataaaatgtatttctcaagaaatgtcactttttttagcaagaacatcagcttcagcttgcaggaagttaattgaaaatccccatagatagaaatgactgaagtgaatgcccttcaggtcaataaagcattgctcagttccttaggtcttttgataaacttgcagttcatttggcttcccctgctgttgttcattaataatcactgaagcttaataattatttcctaatgcttatcacttatttttccaccccactttattactgtctcacattagttaccttgctcccattgtgcgtgtgtgtgcatatatgtgtatttattttccaatagcatggttttattttgcaatttttttatcttttaaaatgaagatgggaaaactctaatatataatttcaatgtatttaaaaatgaattattttggactgtaatgtgaaagtaaatgtagtcataaccgaaagcaattttgaaagttctaaatgaatccttattttcttttaaaaacattaaattacagtggttggatgtgtctgatgagcttcccccttacctttcaaaatgtttgctttggatataaatatatttttataactcagttaatttgcatatacattcaattttcaccccaatccaaaatccaaacccctgctatttttctgtctgcaccccacctgtggtaacactgtcacgttgtgattttcaagcttaatttctgtcttcaaaagcaacagaagcagttttgtgtttaagccaacagagtcctagtttaaaatttctctcttttctcatttgcacatttttaatattccttttatcgcattccccccacatacatcttgaaaagaaataaaatatctcaagtgattcaactttaagtactgtatttgccaacaaggcattgaaaacaaaatactctcaaactgcaggatattttataatcacaaatttgctcattcccattatccccaaggggctaaagcacatattattattccattaaggaaatgaagactctccgagccaagcaatcctctctttagctccctcctcccattcccatgttctaaaactttctctgcataaatagttctcaaactttgttagctataaccttgtgacttgcagaagattcttaagggtcactcctgcagggattcttaagaggtaatccaggttggttctgttttcccacttgaaacaaagcagctcagcctttgcattgtatgttgtaggtctgtctcatattgtacttggaaaaatgaaaattaaaaaggaacttggtgttcaacatggctgaacataattttttaattaagagtttatccatgaatacagtactctagatttttcctagaagctacccaaatcaacacaaaataacgatgacaaaaatccaaaacagtcaaagcaaaatttaacatttatatttttctctaaaaatatttctatactaaaataattcatgaaaaatattgcttgtatttaatatacaaattcattctattattttttcaaaatgacatatagttattttgacctatagaatccatcaggcaccaagattggggtagatccctcttaaaattaatctgttttatcatatacaatttatttatgaaagttttcttctatttctacttgtttttgtataagtgtgtgctaaattttatcaaatgctttctctagatctattcatatgtttatacttttttctttatactttaatgtggaaaattacactgagttttttcttagtcttttagataattctgatgtaaaggggcatgacttttttccttggagaaatgctcagtgcaactgacgttatgatttgacctgttactttttgagattaattaaaaattatcatttcccagagtatcatgaatgttgttctaattatttagaataaatccaaagtaattgcatatttataatgtgttgacaatgtttgaattaaaggcccagaatagccttttccaagatgtgttctgttgatttctaacttcacagaatgctcaaattgactttcatgcttatatacatttgggaaacaacacacactagatcttaggaatcttaggatttacttaggaaatcaaagtatatgttagcagattaaaggttcttataagttctgtggaatacatttattcatcttttttactgaaggacctctttctttgcaaacatttgacagcttttgaagccattaacacacttgcggaaagttctgtcttttgtagatgaggatttttgaaaagctttatcaagttagagtttattaacttgtgataatctggagatttaccaaacctatgctttcctttaaaatatatataaaaatataatttctgattctataaagagtttaagactatctatataagaagcaaagacatcattgaatgttcatatctaaataatagttaaacttctatgtaggcacaggtgtcccttttaactatctcttatttttgcaaaaacaaatattttatttctaactctttaagcataagttaaattaaagccccaaaaaaccacttactgaagaggaatgaaaaataaatcatgacaaaaaaagtaggcttttaaaattgcaagtggcaattgcgctttatacatgtacaaaagagtttaaacttgctataccaaaacctcatttacctgaagtacaataattctaaatttttaacagcttaacctgctaaaggaatctggtgaaattaacctttttaatatctgtgaaagaggatatagaaatcaaattaaaatcatggaagcaataattcagtgaataccataatttctttcttcttttgtgactacttaatatcttaattaaaaatctctcttatctatttgcaaaagcatttacaaactctaacattgagtagccttaccccaagccagtcaatgtgcatgaactggaagatgatttgcagatagataacttttaaattgcttctttattaactacaataacacaaggtatctttcatttctttcatacgcaacttctttctgagtcttccaattctttgtcacccttctcctgaggtcagggaaaatatgcaaggtatttctgaggagaatggtatgactaagcaaatctttaatccataaagttttcttgatcttcttatgtaataatggcataaaagaatggagactaatatttactgagcagctaattggtataaacaccatgtcgggagcttcctatgccttttaagccttacagcaaacctccaaacatctccattttgctgatgagcaaaagtctagaaaggtcattcagtaaataagtagtgggcttgaacatgaagtcaaattcatcttgctctcaacgctatgttttttctaccctgtcacttgctttactgtatgaaaatgtctcgttttaaagtgtactttaacatttttggaattatggtccttcgattaatacttgagatattctctgcttcctttacagtggagaaaaatgaggttaattatagaaaagactcaacccttgatcattaatccctagtaagaagaaaaggtgggattagaatatatgcttttttattccacatgctggtgttttttgtttgtttgtttgtttcaatgtcttgcttctttaggcatgcttgccctgttgtttccattaccctagaaggcctttatgcatataagcaaatctctctattatgttaaatcttcctacccacaatattccgtagactaccttttgttacaagccatttcattggattcagatcagtcactgaaacatgatcctcccatcagtacctgaaactcatttaactcatgatgtgaacctgacgctaacttttgaagaaattcattgtggccattggtaccataaaaaataagagagtttcagcttaagttctaatgttcttatttattgtttatgaaagttatacccaatgtaaagcaggatgcttgagaaaaaaatagagccagaacagttaaaattaatacataacaagatggtacaaggcctctgagttgagttaatcaatgcagttgataacccaacagtaactgcactagcaaggtggacattttaaaatgatttaattttaaaaactcagactttttgttcccttaacttccaaatcactgtatttatattctttcctattgtgatcccattttatattttattcttcttgagcctgcaaaatattacaataaattttgatgtttactcctcttttgcaaagatagcctaacaaataattcttgatttattaaaaaacaacaaaccaacaactgagaacaatacttcattgtgctttgtcctttttgttgttgttgttatgaagggaatgtaaagcactctgttttgaaatgaatagatgaatgataatgtgctcttcaatgggacactgtctcaaaacctattttatctccgtgactgggatcttctatgtgcctcagtcagctggttgatcagcactaggtgctgggacaagagccagcctggcctaacaaaggagtatggaattgccttgagctctcaggaccagaccaaccatttttgtatcactcaacatagatgaacaatacagaaactgaccccagattcatcactttacaaccctttcaaaatatccaaataaataaaatgtctccatttactcaaatgtttagttttaaaatacagattgtattgaaaaagtctgatatattattttctccatagtacatgttgcaaactaattttttttagcaaaaatagctaacacttagtgaatatatactttattctaagcactctccaagctgccttctcacttaatcttcacatgaacccaattagtacatactattgttattaaggttgttaaaatgggaaaagtaaggtgtggaaaggttaacatgacatacctagggtttcatggctaatatgaggatgagtcagattagaaactggtaagtatggtattacaacctatcatttattatttcattaacgtcgtcacgcttaccatgctggctaaattaagttatctgaaagactattttgttcttataagagtgttggcgctattaggcaagaatattttcttcctatgtaagactgagctggaaaaaggggattcagaactgtaatcatcgaggaaacttcttttcctaggttatagggaaagaggaacaaaacattgctggagtgtccctgtgagaacaagagacaacaagacaacaaagtgagacttgacttactctcagagacccccccttccttggagtcagggccagcaaattcttagaaattaaaccggctatgtgctctcatagcacaagcaagccaaatgacatggtagcagcaagcaaaaaagaaatgtattttttaattgtttatttgtttaaattttatttcaatcaccttaggagtacaagtggatttttggttacatggatgagttgtggcatggtgaattctgggctttaagtgtacctgtcactcaaatagtgtatgttgtacccaatcggtaattaaaaatgaaatatatttttaaaacattttccctgtgagaagcttgaataaatcaaaacacaaacaattcgtgtcagaattgttctctagcacaaaagggatttgccagatatgaaggtaggtcactttctggagatgggacaaagcctacatatatacacaaaacctttcaaaacttatgtgtgtatatatatatatatatatgtgtgtgtgtgtgtgtgtatatatgtatatatatgtataatgtatatatataagtatatatgtgtgtatatgtacacctatatatgtatcagtatacatatatcagtatacatatatttatatagagtttatatatgatatatatactaatataataatatactgatgtattagtatatatcatatataatatgtatactaatatattagtgtatatatcttatataatgattatatgttagtatatataagtatatattatatatattagtatatatattaatatatattattaattatcttctgcaaacctttctaagttgctgcatggattctgtaattccggacttcttttcccctttactgtcaatcctaaggcaacaggaatacttaacaacaacagttattttgaaaggatgcttcttggcccttctcgctaactgcttaaatcattcctctgtgttaagaaatgaaaaaaaaaatccttactcaattcctggtggtttctagttgattgacttctaatgagctatctggcatcagcagctccatgaggctgaaaagatttttcccattctctgatttaggccagtcttgcgttcagtttgaacatttttgcatagctcattcaatgcacgaaaatgaatatagaccacaaagaaatgttctttaaaaactatgtcagagacaaagatgtcttatatcatttttaatccatcactacaaataaatataaatgggctgggcgtggtgactcatgcctgtaatcccagcactttgggaggccaaggcaggaggatcacttgaggtcaggagtttgaaaccagtctggctcgtttcaccctgaaaccccatctgtaccaaaaaatacaaaaaattatccaggcgtgatgatgcatgcctgtagtcccagctactcaggaggctgaggcatgagaatcacttgaacccaggaagtggaggccgaagtgagcagagatcatgccactgcactccagtctgggtggcagtgtgagaccctgtataaaaaataattatgcgtgtgtgtgtgtgtgtgtgtgtgtgtgtatatatgtatatgtgtgtgtgtgtgtttgtgtgtgtgtggtaattaacaacatacataatacttaaccaagccccttattttttccacttttaccacacaagttacttgaagagaaattgttgtcatttttcatgatcatttcctcaccatagggagttagaagcataaatagacatttgcaataaccccatcctcccaaacgtcctcttctccagctcccaagtttcttcttttgctcttttcttcctgttccctctttccatttctcaatctctgtttgagttaacattagcttagaagagcaatggattctgagaccttctacgcattctagttcgttttgttaccaaataagtacttaattcgttgaaagaaagaatctgatttcattaatgaggaaataaagtatgtgttcaacccaggaacaagaaaagaacaaaaaatcagcaagatggctataagggtaggttatagaaccagacaggtggcttcaaatatgggcccctttcctttgctaatgacgtgaacttggttgacttgttcacactcaaaagactcaatcttttcatctgccaaatgggattcatgtcagttttctaggaaatcagcaggcttaataaatagcatccctctttcccatccatgttctaaaaatgttgagaaagtgtgaaaaaaagaagcagatggggtcaaaattttcaccttgattcatgataactactaagtgagatgatgtagcttagtgtctgagccaaataaacctaccaagtaaatatgagactgagacacttaaccacctgcacatgccagaccagacctgaaatgcaaagaccacaaaggttacacatcgggcatggaggtacgtcacctactgactttttgatgggagaggaggagaagaagaagtaaataaaagaaaaaaggaagagctgaagtcagtacacccaaattattgtcctcaaatttactagttcgatgaatcatcttattacttctggtaaaatagtgattaaaggttagaaaaagacagaagtgtttatatcgggggaaacttcaggggctggaaagaactattcccccataattttcccccaggtttctgaggtcttaaccctttgtgtctagacattgcactcatcatcagtcaataagccgctacccactcagggaaggagagcagcatttttttttacaacagccttgtgtccaggttcttgtacttttccaataccagccatacctccactgggttgtctcctagacctacaagtggctgttttacattttgttcccagaagactctggaatgagtcacaataaaatgttaaataaatggactctaaggtggtattttacccaaagctgaaaattcataccctgatctctttcttaacctcgaactatgtccagccatattattcaatgtagcctactagggcactgcaaaaagtttgaatgtaaacctcatgagtcaataataaaatttctcccaactagggattccagaaagaagttaattcaagtagtcttttgcttgttaaagtttgtttcttatatataatagtccaaaagaaccccccatcgaattcttttttatttgcaaattacagataattttgcaaatgtaagattatatatatatatatgtatatggtcatgtgccacataatgacgtttcagtcaaggatggaccacatgtatgaaagtagtcccataagattataatggagctgaaaaattgctatagcctgctgacttcttagcctttgtagtcatatcacaatgcattagtcacatgtttgtggtgatgctggtataaacacaactattgctctgccagtcttacaaaagtctagcacaggcaactatgtatagtacataatactagactgttataataaattactatgttactggtttatgtatttactgtgttatatttttatggttattttaaagtatactcctacttacaaaaaatatgttaactgtaaaacagcctcaggcaggtccttgtaggagggattccagaagaaggcattgttatcatagaagatgacaggttcatgcatgttattgcccctgaagacagcgggacaagaggtgaagaagaaaaacagtgatattgatgaccatgactgtgtgttgtctcaggctactgtgtgtgtttgtgttttagtctttaacaaaaatgttttaaaattaaaaaataaaataaaaagaagaaagtgtatagaataagtacataaagaagaaatattttttgtacagctgtacaatgagtgttttaaactaagcgttattacaaaaaaagtcaaaaagttaaaaaacgtgagaaagtttataaagtaaaaaagttacagtaagctaaggttaatttattgttgaagaaaaatattttaaatacatttagtgtatcctaagtgtacagtgtttataaagtctaaagtagtatacagtaatctcctagaccttcacattcactaccactcactcacagactcacccaaagcaacttccagtcctgtaagctccattcatggtataccagtgtgctatacaggtgtactatatttcatttttcatcgagtatttttactgtaccttttctatatttagatacataaataccattgtgttacaattactgacaatattccttgaagtcatatacaggtttatagtctaggagcaataggctataccatacgacctaagtgtatagtagcatctaccatctaggtttgtgtaagtacactccatgatgttcgcacaacaacaaaatcaccttaggatgcatttctcagaatgtatccccatcattaagcactgcatgactgtatgtgtatgtatatatatgtatttatttacatacatatataataaaatggatcccaccctgccttttttattttcaacttttattttaagttcaggtgtataagtgcaggtttgttgcataggtaaaattgtgtcacgggggtttgttctacagattatttcatcacccagacactaagcctagtactcattactatttttcctgatcctctccctcctctcaccctccaccctctgataggtcctagtgtgtattgttactctctatgtgtctacatgttctcatcatttagctcccacttacaagtgagaatatgtggtatttggttttctgttcctgtgttagtttgctaaggataatggcctccagctccgtccatgtccctgcaaatgatgtgatctcatttctttttgtggctgcattgtattccatggtgtatgtgtaccacattttctttatccagtctgtcattcatgggcattttggtagattctatgtctttgctattgtaaatagtcctacaatgaacatacatgtgcttgtgtctttataaaagaatgacttatattcctttgggtgtatacccagtattgggattgctgggtcaaatggtatttctgtgtttaggtctttgaggaatgaccgccctgtcttccacaatgtcaaacctgcttcttactcttctctgacttaactaaagggcatgtgatgccaatatagagttagttttccttcagcagatgcaacctgggctgttttctcaggaataggttcaattttcttcaggactttggaagttaaattagtttgacaacaagactctggtgcccatgattttctttttagagtccaatagaaataaagccacataattatcaccaagatatttagaaaataacagacttactctgagaaacattatattcctagaacctagcacttggtactgccaaaagctggagaagatatcccatgttatctgaacaaaagaagaatgcctttggtttatctttagccgagtgcctctcagttcacaccagttgcccagaatctgcaatctgtaaccttgctcagttgggaggaagctccttgcagatggttcccttggaactgtgcatttgctatcactccttgttctctcagacatcactgctttcttggcgagttaaaatttttgcaatggtgcagtcccagctccaagatcatttttttgtgttattttttcttttatatccatattttcaaaatctgttcatttatacttacaccttgagtctcatgttcttgccacccaagttccaaattgagtcagcctttgcatttaccaatgtgaccctttccactgcctcctatttttgaattacttatgtccaagacaccagtcttctacggaaaattttcactccagtcagagccaccataagaccacatgttgggaggtggttttggagtctgtaggccagcgacaggagtgcaatctttgttctttctcgatttctttgttgtctgatctacagcatctacaatttaaagattgaatcttattaatgcacatagaactcagtctggcaccaaaaactgtgacttaaccctcttacatctaaaaggccagtgcacaaactgtttttcttgtgacagattttatgctatttcaagcgttacttctagggtaagctataggaacttgccattgaggctttctgcagtggataatgcaagttggtgactgctgagatccaaacacagcctgaatcttcaccatctatgtggccagcatttgctgaggtccttataaggctgccatgactgcagagaagctataacattgttcgcatgccccgcctgaggcctgagttgcctacacatcttcagaagccctcctctgctcaaggtcagggccttgcatagaggttaagcctcattggcagagacatgtaaagcccgagaaccattcacttgaagctactcatgcatacaccgctgatattatgaaaatggctacttcactctggaagaagccacaataagcatcaccaaacatttagcacagctgattgaagccttatggcctgtccacagcagctaagagccaaggctcgagggaaaaaatctgcctaggctagtatacgcctttacaaagcaccaagataagaatgttcttcccacacactaaactcatggccccaaaccatatttcttacccacatcaaaaaccttttcatggagatcttcagcttctctaattattctctttgtctttattgctcaatatttctgcttgagtctccggggatgtgtgggaattgataccctcattctctgtatattctctgatctaaaaagattgagagatagaatatatcgggaagtcacaaatcaccatgtgcagatttccaatggacacatcaaacatgtttcaacacgataaattctcttagcctattttgagaatataaaagagtccagagaataaggagaaagaaattttatgacaatgcattctttggagaatactgcatgagtctcatctgatgccatctccagcatgagcagttggcccatccacctcaccttaatccttccagtggtttccaaagtgtaatttggagaggtgattcccatgcgtgaggggcatagccaactgaaatcctccctgtgcctgataatcctggagcatgagacatcttctgaatggtctatagagatgcttctctatgggcattgccctgcttttccagttatttccaagaacaaagaagcacaagtgcttcccagggactggatgtgggtccttgggagagctgatgagagtcatctagtccaacagaacacaccagatggaggttggagggagagggaagaatgagtgggaagagacagagtgaacatctcagggctcaggaaggagcatgagcagtcagcacctcgagtggtgagaagctggaggtgttctactcatgcattatctttcacatgaacaatagcgtcaaaagtgggcggaaagcattctccccacacagcaatgcccatttaataagtttgccatgatgattgacttggtaatgcatgtaaaaggcttaggactgcatgcttattagcctatcaccagtacctacgtgtttaacattatatgacaaatactcggtgagtgtcttagttccactctttcctaatatttattacacaccccttctcccactcctggctagtcagcttgcatgtacagtcatttctgctataatgcaacatatgtgttcctaagaatcgctgctctgtgtaacgtcaagcaattaaaaccacagagctttggataaatcggcttaggcatacaacactcatgatcagtgacacattttttaaaaagatagaaatataataaagatggcagcacatcctgtatctaagataaaagtggaaattaaaacaaaaatggtagcacagttttatccatgtgaagtggttaagaaacacatatcacattcaatatggcacctggagtttgcttgtggaagcggacagctctgtgttattgtgaagtgagggaaggagcatcctctgaaaccagacagaaagctataacaccagatgtagacgggtgtggcttgtggtcctcgtgaggtgtgtgcatttgtgtgctttgtgtatttctaggtggctcccttcagccgagtgcagttttctgtgtttacctactgcttctcatggatgaaaactcatgtaaacaaatgcaaaatttgtgttatcctcaaactgaggatgatataccaattacgttggaacaaattcatattttcaaaatgagcagaacagtacatatttacaaaccagaagccacacatcccctagcctgctttgaaaagggataatttgtaagaatgtgatctcccaagtgcaatagttagaatctttggatttaggccacgagcgtttgccaaaagaaatatataatggagaagagagttctggagacctttgttgggaaagccagaacatcctcatagagttactcaactctggctaaattatatgtgaagacctagacgacacctaaagaattattgtgcattttgaaagcaggaagaggaaaagaaaaggaggaaacaaatgactctgatcaattcttggtaataacaaaggaggaaacaaatgactctgatcaattcttggtaataacaaaggagatacgattcccactacactctcacgtgatacattcaaatggtaactacttttcgtctatttttgccaaaaatgaagacataggatcataggaaaaaaacaatgtttactaaatctatcaatcaaagccactaaatcctaattcttctatttcaagatccattaaaaagaaatttctggggccgggcgcggtggctcacgcctgtaatcccagccctttgggaggctgaggatcacgaggcggatcacgaggatcaggagatggagaccatcctggctaacacggtgaaaccccgtctctactaaaaatacaaaaaaaattagccgggcatgggggcgggcgcctgtagtcccagctacttgggaggctgaggcaggagaatggcgtgaacctgggaggcggagcttgcagtgagccgagatcgcgccactgcactctggcctgggtgacagagcgagactcagtcacaaaaaaaaaaaaaaaaaattctacttatttatttttaacttttattttgggttcaggcatacatgtgcaggtttgttatataggtaaacttgtgtcatgagggtttgttgtatagattattttgtcacccaggtactaaacctagtacccagtggttattttctgtctctctcatctcaccctccaccctcaagtaggccctagtgtctgttgttcgcctgtttgcatccatgtgttctcttcatttagctcccacttttaagtgagaacattcggtgtttggttttctgttcctgtgttagtttgctaatggcctccagctccatccgtgtttctgcaaaagacattatctcatttctttttatggtggcatagttttctatagtgtatatgcaccacattttttaatccagtcttccactgatgggcatttaggttgattccatgtctatgctattgtaaatagtgctgcaatgaacatatgcatgcatgtgtctttatggtatattcctttgggtacatacacagtaatgggattgctgggccaaatagtaattctgttttagaaatgtctacttctttgtttttggagtgaacaataacaaataagtcaaatcaaacaagaatatataaaggtttgtttgtattttaattattaaaatattgaaaaaggaatacatgaattatttacaaaagcaaattgtcagtcactggaggcaggtgccaaaataaattcttctcttcagtgtaataagaagtgctctgaagcaaattggaatataatattgataatgacaataaattgtaaattcgtataactttgtaaaaatttaatatttgtgcatttctgaagttctttgaaccttcttttttatcagcagtgtttctaggtagtgttcatttcttcagacagaaggttcttaaagagtcatgactgccttattagttatgtttgtgcttccaaaacttacagtccattccatctgtggtgagccacttcagcaaaatatattttggaccatgaattattgggcataatgtaacaaagcaactggttgtttgacattttttttttgtttggtatcatgtagatagttatttttagaaccaactctaaatgacttttctccggcctttttctttttttttgagatggagtctcgctctgtcgcccaggctggagtgcagtggcacaatctcggctcactgcaacctccacctccagggttcaagcgattctcctgcctcagcctcccgagtagctgggactacaggcatgcgccaccacatccagctaatattttgtatttttagtagagatggggtttcaccgtgatagccaggatggtctcgatctcctgacctcgtgatctgcccccttggcctcccaaagtgttgggattacaggcatgagtcaccgcgctggccttctccagcattcaacaagtgtcatgctatagtcgacgtgtcagaaatatccagtgagaatcagggaaacctcattagaaagagttcctgattggttcccatatgttcctgagctgtttactatattagagtatggtttcagtttctcttatttctttcactaatctttgggctctaacaaggtatattctcattataatctctctgttctctcaaaatctaacacagtactaagtacaaagttagttctctctatattgtagttaaatggaatgagttcattacaagaagattagggctgaattagcccagtttggcattttacatatttgaataatcaaatggtagctagaacctctattttgcttggttttattaattcagtgggggacacctgccggatttaatttctccctcatttctaatggactaagtcagtttaggtcactgtgaagacgtgggtgaggtcatgaacttcagtctagggctgctgttttattgtttagactatcgcagccctcctaagccaaatttcttatatactttcaaaataaaaatgcagcaaactagtgtggaagtagcctccagagcgttctgcccctcaccacccccggcccctccaaagttagacttaatcttcttgtttccatgtcaaatccaaactggaccaccatcactagtttcctaggaaaccctgaaaaactgtctttacataactcactttgcccactattggaatgctgccacttctggggaaaggcacagcagctgttcagctgcctcatagcaacacttcacaacagtgtgggaggaaagcaaagaccagcaatatacttaaattaaacttccctggggagagcaagataccagggcagaaggtaatagtttagagtcgagagcatctaattagtcaacaaacctgccctgaaagcgaacgtagtgaatttttaatgaaatcaagagacccagtgttttttctcatcttccacttgaaaggcactgatacatatttaactgctatcatcgaaagagtccttctgtttcaaacatacttccaaagaagtattttttttatttttattttgaactaaacaacaaaaaagaacacccacagcaaagaataaaggtcaactgggttatgttttcatataattcctactatttccccaaaagttaataacatttcatccagctaccccttggactagctaggactagctagaattgccaaaactcagatgacaatgcaagaagcatcgtttcaacctggctctgttctctctttagcacggaaacaaaacacatgtttatagcagccattctttgaaccgtgattcataaaataggggtagaaattaaagaggtaaagtcaaagttgccaatagtaagaggaaaatatttgaacggatggaacccaaactgccatgtaatgctgtgcagtttgctgtgcataaaggcactcagccaacgaagcaaatggaagcttaaaatgcagtttgggctcccctaaccaaactgtgcacccaggagtcaggctactacttcccgaagaaggggtacctttttctcagcacaaaggcgccatctgttggccatctcaacagaggggctgctttctttcggcgggttgtggtcattcagaggggaagccaatttttctagtggaaaccccgcatagaatgggggaccctaagaggcattcttgtacaaatacttcattttatacataagagaacaaacaccaggggtccagtagagaacaaaaataaggacctctgtttcagaaagcagaaaaagatgttattaaaagtactaacagaaacttttttctctctccatgaattctctgaaatagtcatggtgtctttatttgctccatgttattgatttagtgtaattctaagcaaagacaattttaaaatgtaattattagcattaatttcccttttcatctttatgtcgtgaaatgtcagcttttaatatgaatgtaaatgcattttgttggttacacggagtcactgatgctatccacttcctattttgtaggtcgtacacgcctacccatttccttcttatcagaagagtgaaaacactgcagaaaaccacctcttctgtttgtattttacttccggaaacatatacatcccatcaaccctctctatcttcagtttactagtgaataaagaaggacttaaaggtaaagagaccatggctactcctatattccaatgttgtcttcatttccagcctaagtggctggctggcacatggagggaagtaacaggagttagaatggctatcataggttccttgttcctctatgtttcccagaaggccattgtcttatttctccaccggaaagcaacttcaggtttgaatggaatatgtggactctagggatgtcagagtccctgctcactcccttgggaatggtacatgcttacctgtactcttgagtctttctagaccctcaggcattgtgagtctactagaattttgtgtcatgcagcattgcaaatgctataagacaatggggaagtacggaactacagggaacattcaaagtgtgcatatctcctctgctcacacataggcaccattgtcccattagactttacttacagaacacaagttgaaggattaaattatcaagaatttcaagacagtaacatgagagcattaaactagacacagggcccttctgaggactgagcacaggttgccagcccacaaaactggacatgagaaatattaagtgatttgcctaataaccagagataaatgcctttcaacttcagctcatttctaagcattaacttctatttacttttttttttagctaataaactgacctttctaacaattcttcagtgttactattagatcaatgaataatggaatgcaaatgtttgggagggaaggatgctaacagtgatcgaatgctcatggtgctttgccgtgcttacctaaatgatcttattcattacaattctaatgaggcaaggtgtgtttaatgcatttttaaagctggatacttaaaaccttaagaaagcaagtaactcatccaatgtcaagtaacttatgtgttgagaaagcaagatcaatgagttataaacacacggaacttgagttccgttcccaacctccctttcaaaatctattcagcggcgtcgctttcccatgactctagatggagagttgggcgggcccttgagtttctacctgcttggaggtattgaacagtttctcccattactttagatgacaactcagattcaacttggaagctgaagtgtgcaggtatctgtaacattcacatgtctggattgacttaatgttaaattttcttcccttccctagctgggctgttgaaattggccacaccattgccaacagtgacacagcacttcctctttcctgcttgagtcttcctccagttattagtttgaatgggagtggttagtacttagaaagtggggtgtggagcatgaaatatgggagtggggatgagaaatttcttattggggtgagttttgtgccaactcagacttctcttaatctcaaggattctgttttaacctgggttctcacaatgcagaacctgcataatttattgggaactgtaaccctgaaagtgagggacaggggtagtgaaacaaggcaggttcaaaataaggatgtttcaagatggtcaatgtcaggatatctggatgttcactcctatgggatcttctggaaagctgagtggcatgagctttaggatcaggccttcagcagaggaaggagaagttttgcttgctggtttctatgcatatttatccagagttcatcccatgagacattagccctcttagagttccaggatgaaaaagagtgatcacaaaattttctgccatgtcacagaaaagcccagggatgggccacaggaatgctggatgggcttgatgtatggtggtgccaagatgcacctgcaggaagccatttggggtccatgcacaggcccatcactgaagctgtggccaaaatcagagaacaaaggggtttagtggatctgatatgatgcatgaacaatgtctaacatgggtgctttcctgggttcactggaggagattcaacttgggccctccaactcaaattctaggtgtgtgccctgcctcctcttcagacatttgccttctgaaagcctggcccttgggaggctcactttatagcacatatcacctctcatatattggagtcccattttcctcatcctgatagtccttttgagcaggacttcaatagctccagtccagttcactctgcaacaaaagtctgcattgggtcctagaaaaacagtgacatattccttggcctatcatggaagggaagtacagttactcctgaaataaacaagaaactcacccctgttccaccagccaaagcagcttctataactttctatttttcccttaagttttccttggctgaaagtcagaccgcaatgcaccatattgtcaaatgagaggacaaagcattcacaattaagtctcactttaaagcctctcttcttttcagtaaaaatcgctttgtttggtgattgactttatgatgataaacatacctgaaaaagtctgatggagagtaagaaatacagcttttctaaacagaaataaggctttcagggaatgttctacaggactatgagttccttaaaacactgcaattcatttctccctataggctggctaaatttactgtcctctcagtgtgagaactagtcttctcagactccttgaaaaatgttccaatctttactgttttttagaaagtacttggatacgactagaaaatacccatcctttttaagaatttttaaaattcttaaattgaaaacacctccattaattttagtaatgcagaacacaagatagaactgagggttgtgtttctattcttactgtagtgtctagcaaagttatataaaattatgcataatatatagtgattatctgaaaaaaataatttgaaataagcccaacatttctctgccttttcttgattaagaaaatttggaggtcaactaaaaagcacacacttattaagactttaactgaaatattgctctgtggatcaggaaaaaagaaattccaagaaactcaaaaattcagagcatgaaaatatactgatcttagtgaagactgtattagaatcagaaacagatgacaagggaagggaggagaaagtgggaaccaacaattcagcatgagaatagaactgtgtctatagtcattctgtgaattattaagttttcacctttggaaagatgtcttcgcaaggctagtagttttaagtacaaatggggataatgccaaatgatggttttgcataaaaagactggtatagcttagaacatgcagttctgaataatattggagtaggaaagcaagtcaacaagctattgtgtgtgtatgtaatggacttaattagaaaacatggatttggaagaagtttacttcttccagatcattcttggggctattaatacgaaaactgaaagtcattagtgaccagcgttgcctcaaatcttaccaggtcaaccccagctgttctgttatttcatgagaaaaacatcaactgtttaatcattttatttgtattaataattttattactttaatcatgatgaagaattctctaaatgatccttttgccaaagatcatgttcaccttcaagcctaaactgcctacgaattagatgtgctgttttcccagaaacaatgttttcattactattaataagtagttacttttattaatcccagacaaatgacagtttaaaagacatcatcagaggatatttaagattttgttttgccttgttttatttattcactccaatgctaatgatctggaggaaaacattgtttcattgttttattccttcaacggtattatattatttaagcaacaaccgcagcaaaatcctcaggttttggaagaggcccattagctagcggcactaaagtgggaagaagtaattaaaattaataactcaatgcagaggattcctgcttctgaaaacgattagcatctctttcctgttcgtactttttcttctttgtgtgtgtggatagaaacacgatcatgcttgttgcccagactggggtacaatgacacgatcatagcttactacagcctcaacctcccaggctcaagcgatcctctcacctcaacctctaaagtagctgataccacagataaatgccaccatgcccggctatttatttttatattttatagagatggggttttaccacgttgcccagggtggtctcaaactcctgggctcaagcaatcctgccttggcctcccaaagtgttgggattacaggcatgagccaccccgctcagcctgtccttttctttacagtgaatttaagttttaaaagttgtgctaaatttatttgaacattacatcctgcaggacatgttaggatgcaccgtataagccatgaacgttctaatactgcagggattcagtgaactttccatttccatacaaacaacctcctatcttctgtgccttccttgaggttcccctaaggtgccctcttctaacaggaggggtaaagccacagtcagcctgctaacagctacacagcaatcaggaaagtgagaaaattaaactaccagtgacacatgttccgtctcacccgtttttggagaattgatggagtgtggtagttcaccttgtacctcttcacctttacagcacaacttgaatgggtctggcccattgctggacagttggaggctcaacttcatacattatgctattactctctgtggaacaggaaatttcttgttgcttttaaaactatctgtttgcttccctccatatagatgggagaatatggcttaatctgccactgggaaagcattacatcatggtagggctcagggaatttgagagccaattaaagggtgtttttttctctttaagattaaaattttaatattgaacattactatttttctaagaaaaacaactataacttctagaatattcaacacttttaattataattaatgtcctatttatctcatgcattgttaaatctgcaatttacatatttaataaaagcaacattattaggtatccattaaaatctataaaatgcaagtttccattattgagtaaattaatttctcagtgagtggctgtttctcttctcccaaccactgatgaagcaacattattcatcagtttaattttactagttgataatacattgctgcaaacattaattttctaatgcatccctgtacttactttgtgtgtatgtttgagctggttaagaggccctgacgattgttttaaccattgacagactgcaagatgagctaaacttcagctttcaacgaagatagactgagtctgcttgtattgagatatctgactttccttaattacaagacttttccaactgcttcctaaaacgttggcatagcattagtgaaatctctttttttttttttttttttttttgagacggagtctcgttctgtcgcccaggcgggagtgcagtggcgcgatctccgctcactgcaagctccgccttccgggttcacgccattctcctgcctcagcctcccgagtagctgggactacaggcgcccgccactgcgcccggctaattttttgtatttttagtagagacggggtttcaccgtggtctcgatctcctgacctcgtgatccacccgcctcggcctcccaaagtgctgggattacaggcgtgagccaccgcgcccggccgtgaaatctctttttaattgtttcaagtaaagacatttgtcattgtctctgtaccatattgtgcttcttctacagactcttaaaattcatgtatgtcaatcttattgctcagaatcacaaaagtaaagattcaagctccttgatatctgtctaatatataaattctttctttcacttatccatgttctggagactttgagagtcatctagtccaaaaataagaaggcaaaattcagaatctctggaaaatggtgcccccaggtttctaaatgactactgactgtgtccaaaatctgctacagttaaaacaagccattcatctctgaatctttattttaaaatcccatacctattgtataaaatgcttggttatcaaatttgttagttatatgtttatttgcaagagagttcttcccaacttcaccgtgtccaagtagaattgcttttaaaagtgttatctttctcagctctgctgatcacaagctatttgacgtcagatctcttgacttcagtttaggcatcatcattaccccctgacctcctgcagctctgaggaagacacaggacattctctagcttggtccatcttgatgagactactgaatgtaaaagggttgggattgggacagagagggcaagtccatttcaaagttttgattgaggaaaaatcttttggttggatcgtaattttacctttcaaaaacagacaatagtaaaaagataggactatggaagagaacatacacacacatgcacacagacacacacacacacacacacacacacacacacacacacacacacacacacagagctatggaggcagaattgcctagcaggaataatggtagttttgaaattaaattatataaagacctgggtttaaatgctaagctcaaaattatatcaagtgattttaggtaagatagctaacatttcttagcttcagtttccccttggaaaaccatagatattaactatctatggaactgattcctggttcatagcagccatgcatcaaatggtacctactagagttctaggaaagaaaacaaagagttgagaaagtgattataccttgaattttagtcaaagcagagtgaaaaggttagctagagttttcctctgtgtaatatactgagaacaggattcatgtgttagtaatttattctacactaataggtactgattattcagggaaaaaaacatgaaatataatacatatgtgtgtatatactgcatatatatatatatataaaaaatacttattatgtaatatgcgtgcacatggcgagcacgatactcccctgccatcttgtggtagcacagctatattatattttcaagtgtaatgaattttattctaatgccatgggttcatggcaaataaataaaacaaattaatttaaaaacacacacacacacggagagaaagagagagaagagttttttttatcagcatacacatttttcaacaactttgatgattttgttttgcaaataaatggatgcaattttatttttgcaggaagaaactcattaattgattatttccaccttttattgagtgctttccatgtatgggcctgtgtcaggtcctggaggcacatggcttaataagaatatattgtttgtcctcaaggtagaactgatgatgaatgctattacaatgttggagccatgactgagagatgctctagaaatcctttggctgaaccacctagctcagagtggtgcattgagagatacttacaaaaaaagaaaacactatggttgcgtattaaaagggtggtagaaattagtcaaatagagtaaaactttggggagtagagtggtagaagaagtggaatcaaggcagagggaatatgatgattgagataaggagtaaaaatttcatttcaattcctaatgtactcaccactgatttgccaggtatcctgctaggtgctgggatgccagagtagacaaggcagatattgtccctggctctcttcaggatctttttttcctcttccccttctcaaaatctatgaactaaaagggaagggtttctattcttgggcacacctgttttattctttgtttcttgactatcatcaggttttttacagcaagtatgctctgttaatgaatatttttgactatgttgtaacatgaaagttgcatttcacaagggaagtgatacaaatgtgaggaacttaatgaaaagaagtagtagatcatgctaaaacaaagggatttgccctgatattgaaggttggaaaagtcaaacgtgaccgccatgacaaagtggcatttaatataaagaatgaagtaagaatgagacttaaccaggtagggggaaagattaatggctgagagaaagaacttttgctgcactgggaacagtgtgaagcccagcaccaggcaccatcttttcctctgaaaaacagaagggagttttatgtagatagacagtaaagtagagtagttattaaatgaggccagggccactatccaagatattaacaatctaatcctggaaactgtgaatacactacatgacaaaagataattgaggatgcagatggaataagattgctaatcctctgactacaatggggaaatgaccctggactgtcgaggtgggttcagtgaaaccacttgaggtcttagaagtaggaaagggagggagaagaacgagtcagaggaatgaattagaagagggaggagagattccacaaatgacagagaactggcccatgactgttgactttaaagacaaatgctgcggtcaagggccaaagaatccaggtggtctctgaaagctagaaaagacaagaaagtgaattatcctatggagcttatagaaaagaatgctgccctgtagacaccttgatgtttaccacagtgagactcctgttgggcttctggcttcaagaactataagataatacatttttgctgttttagaccagtaaatttgtggtcatttgttatgacagcaacagaaaattactacattagatgtattgtcagtggtagattagggaagccctctaagctacgttaaggattttattccttatgatcaagcggtcactattccatagctcaggaaggaaaatggcatgtttgcgtatgcaaagatcacaccaactggtttcactgagactcaatgggtgggagcaatagtggacccaggggaacctgggaaaggggctgttgcagttgtttgctaatatgtggtagtgatggcagactggggaaaaaaacagacttattcatttcagagatacttaggtgggaaaactgatgatgtttcctacttgatggatggaaatggtaagacaaagttgggacttaataccaaaaatgtgagttttattgtgcaaattaaaaaatgaattttaagaaaagaaaatcagagattggctcgttagatatattgttccattacataatgatgtcagtgagccttggaatagcagtcaaaaatattcagtaacagaacatacattgcttccaagacctgatgatagtcaagagacaaagaatagaacaggtgtgtcaaagaaaagaaacccttcccttatttttcagattttaaaagggggggaagagaaagcacaagatcctgaagacagccaaaaaataaagaaaagagaggctatgtcataaaagagggaggaggggtgacttcattgaataaatcgtttttaaatctctatttctcagaaatggggctaaatagtggggattaaatgttaccaagagcaagacaccttgcccttagattctatttggaaggaagacaagcaagtaactgggtaattttcaaatggtccagtagacatatgttgtcttgcgcgatgctcctactgatgttgaatacctttccatatgctattggctagtcagaatccctctgacatatcctgctcccattttctattattgtttattaccattatactaatttataagagcttgttgtatattcatatactattcatttgtctattaaatgttttgcaaatattttcttcaattttaatttttccatgctaacattgtttacagtattttttcttttttttcttcatgtatccaaatctgacttaaactttaaaaactttataatcaggatagttttactttatgtctttgatattttggttttttcttaggaagtccttacttgtctttatttatatatatattttagacagagttttgctcttatcgctcaggctggagtacgatggcacaatcttggctcaccacaacctccgcctcccaggttcaagtgattctcctgcctcggcctcctgagtacctgggattacaggcatgcaccgccacactccgctaattttgtatttttagtagaggcagggttttttcatgttggtcaggctggtcttgaactccccacctcaggtgatccgccctcctcagcttcccaaagtgctgggattacatgcgtgagtcaccgtgcctggccaatatattcttataaatatattcatctatagttttttattgatatctggtacttgtacatatttatgggatacatgtgatattttgatagatgaatacaatgtgtaatgatcaaattggggtcataattttagcatctctattgatgtttaattaacataaagtgcacatatttattatgtacaatttgataagttttaaaatagatatctacctgtaaaaccatcatcacaatcaagaagataaacatatctatcaccacaaaagttttctcaggcttctttgtaatctcttccaccaccctccacacttgtctacagagaagtgtcaatctttttctgtcactaaaagttagtttgcatttctggaaacttatataaatagaagcatgcaatatgcacccttttatgtcttttactaagcacaactaaactactgagatttatctgtcttgttgcgtgtatcaatacctcattccttttcattgtttagtagtatttcatcatatagctatagcacaaactttttttacccagacttgttttgaacagttgtgttgtttccactttttgccattgcaaataaagctgctgtaagcatttgtgtatgggcctgggtataaacatgcttttagttttctctgttaactatctagaagtggagtggctggaccatatgaaaggaatatgtttaactgtttaataaactgccaaattgttttccaaagcaattgtagcattttacattctgaccagcattttatgagggtcccggtttctccatgtcctttccattatttattatgatcagtcttttccattgtagcaagtgtaatgcatgtgtagtggtatcccattgcagttttagtttgcacttctctaatgactaacagcgttaagtgtcttttcccccctaggtttatctgccattgtgtatctcttttttggttaagtatgtattcagatcttttccccattcttaattacgttatttgtagaatctgtttcaagactgatggccattgtagtcagtgatcatgtttctgaaaatcaatcagggaagtcacctatttttcaaagtcagatggtgagcaaaagccttactccatgaacacatttctgaaagctggccaatcaacaataaacttacctgagcagggtgtagtgcctcacacctgtagtctcagctacttgggaggctgaggcaggaggatctcttgagcccaggaacttgaggctgcagtgagctacgatcacatcactgcactccatctgggcaacatagcaagaccctgtttctgaaaaaacaacaaatagcttacctgaataagcacatttccactgctgagatccaccaactcctgactttgaaagtcggccggtccctggctctacctcttccaaatcctcatacaaaataagcttcctgctttgcaatcagggaaatggtgcctaaaaaacatagttctctcttatttaagtaataaattcagatttttttctaggtgttgagtggtatcctctcccctcaaaaccatgtagtttatcaaaaacttctttttatgtaggttttgtggtttagaaaaagtctgttacttcttttctgaaagaaatgaatttttttatccatgtgtattgatgagttcatcctttcttcccttatttaaatatctcctttatcataaactaaattactagataatcttaattttatccaaaacacttagtcataattttctttgcatttccatctttttttcctacaaacgccaagtgctagttaccaaatggttctacttttctgacagcagaatctctttacacatcttgtataactcaaaaatcgagttatgtgatatagttagaggtagtcagtttatttagtcttacatctgaatatttcaagtttatctatttgatcataaaacaggtttttttaaatactcttgggctttctcatgaaaagtagtgacagaacaaatgcattgaaaagaagaaagataatggtatagacaggtgttttctttcatgttcaatcaaaaggtttttattttcaactcagaatctgtgaagcttcatgagatcagggctgttgtatttttctttctacatgcctggcaactggagcaatgccttccacgtggtgtatattaactatttatgggatgaatgatgaaattaatgaatgagtgaaataaataattttgtctttctgtgtatatttatgctaagcatataacagggtaaaattaagaggcgttattcttatttacaagtaattacaaaagggtgggttggacaacttagtttttgtgagttaaatataaaagtaacaatgtattctcactaggtgagaaatcataatttgccagacaaatggtgtagactctgaatacttggaaaggtataagtcactggggactaaagagattgagtctccctaaatacaggcctacatttggacactgaaatgatgttgatatatatattttaacatgtcattctgtcttttaatctccttatatgtaatacttgtttccttcttcctcccattcacctttttctttaagtagcagtttggtcacttagcgcttgactcattcaagccgttgaatgacagcaccatgttagagatgcccaaaggtcaaccagaaagaaacaaagacgattttgttcctagatttatagttttaaatgaactcagcatagttttagtctatattctcaaacattgtcatttccccaatattcttaaaatctttcaaaccttgaaagtcggcacataagaatataatgattgtctcatacctacacatagcgtattcactttcttgttgatcatgttattgttctattactatcaaaataatcattgtggaaaggtatgaaaatctgacacactgaaacaaatgaaccagaagagattaagaagacatcatagaaagtgcaatgtgctaacttggactggatcctggaacagaaaagtggaaaactggtggaaaaactggtgaaatacaaatgaggtctgaaagtagtcaatagaaatatttaatagtaatgtaaccaaagtcaagttcttagctttgacaaatgttccacagtcatgtaagctattagcataagtggaagctggattatacttatacgtgaactctgttttatttctgcaactttcctgtaaatataaaattattctaaaaataaaacgcttattaaaaactaaatataaatatatttttcagtaagtatactgaagtgatttctaaattaattatattattattacatcaaaaatgagacttttactcatcttgttttgtttactgcgggtagcacatggaaaatgctcaagtcactgaattatagagcaccaatgaataattttctttagttttcaatatgagaagagtgtattctccacttcagccaccaggtggaagtatcagcacatcagttaaaatcagttcttcattgggaggtttaaaaactacccttggaaaacaaacagtttttaatgttatgatatgatgttattatacacagtaagaggaagaattcccagtattatgatgaaaatcaagaaagatataaattggctgtggacaggactccaggatactgagatatccagaaataaagtgaaaaaaaattttaccatttatttaaacatttccagacatggatataagtgcacatggataaaagttgaacaggtagcaacatctggagacttaacggacatttatcttagcccagacataagtgtagcatgcaatgtctgaaactaccaaggcatggaaagctaaactgatcagtatgatgctgtcagtgctttcagtatgggtgatattcaaagtacaggagaaccatttagactaaatgctaccatttaatggcccaatctgcattctccctgctaccatcttgatgacactttctaccattcaggaaatgaaagcactttctagtgtcacccagtgcaatatctaattaggaaggcaaattataaaaataaaaatggaactgcagtgtctttctatccaaaaacgaggcttgctttgtagtttctaatccatcagtttctttccttactttgaataatcaggcatttgttatgtctaattttatgtcaatcacattctcaactctctgtataaactctttcaataaagattgatacaggtatgagaagaaccagaattttttcaaaaatattatattagacacaatttaatataaggtgaaatctattgattcagtcacagtttgatctgttattttcacataccacattctgtaagatgctcacaggctactgaaataaataatgatttgcctttttccattttctgagttatacaagtttttagagatgtgtcttgtgtaaagtgcatcattgcctgcttttcaattaaaaagacttttgaggcctgagaaattagaccaaaaaaggattaatcataataatcttttaaatagagaacacctgccatcaatattttagaaagtatcattctaaaactaaaacttctattactaagagattataataacaggcaaccctacttatttctaagaatagggtctacatgtttttacttattggtccacatattctctgcaattaaaacttagacaacatttgagtaatgttgtccatgttgactgatgaccacagacacagtgatgatataaatcttaaacagattcatttgatttcctcatcagtgatgaactacaacattctccttcatgatttcttttcttatgtccatacctatccatttaatcttaattctggttatttggaacaaaaattccaataagtggcatttttccagggctcacatctaatagatcaagacctctagtgctttgatgcttaggtgtggaaagagctctttaccaggaatgccgggcactctgaattagtcctgtctgctcagaagaacattgcctctccttaccaattttctaattataacgaacatacacaattgttaaaaattcttgccagcctttggacaattacaaaacagcatttttcatcaaaggacacctggagtatgacttataggcacttacaatccagaaagataaggtaatcaaactctggaagaattctgccagccgggaccctttaggtagaaggcagtgaggtagacttccgtggatctaccagggcaacaaaagagaagaggcagagcccttctgagctattcagcagggagaagactgagatgctgaaaatgtggctaaagacacagtagtactgtgagtcctcaatataacccatatttttttccaacttgtgttaatctaatacatcttttgaatataaaggaagaaagtgtaaaatgcagttggtgatttggttgttctatttttgctctcttttcctttatacaacagaaaattttggttattcaatattgtacttaaaggcataaggcatgtgtgtatgtatatatacacacataaatatgtattatatatttacatattacatgtattataatatatacatattatatattatatatacatattatattttaatatgtaaaatattctgtcatttgtatttacaaatatgtcaagtttgttttaggataggcaaaatactctaataagtaaaaatttcaccttttactagtagttttgatgctatatccttggaatttcagggttttcatagaaaatgttttttaaagaaaagaaaaaaatggtagaaatttcattgtcttattttttaaggaccattgcttaattacttttttctcagttctgtttatttgctcttaaaacaaaagaaacaacaaaaactgatggctttctcggacaacaacaacatccacaacaacaaaaaaaacactaatcagtttctgaaaaactaaagagtaactgattattctaactattaactacccgaccattcaggtcattgttcttttctacagtgtgtgtttatctcatgctcatatattggttttttaagtgcagtatactatacttaatcattgtctaagattctttggaaatctgtttttctattcaatttatactcctagtagaaaattttttggggaacaaaaaactgaaccatcataaggctaaatgaaactccttggaagtaaattgttatttgaggtatctaaatcagaaatttctgttcttcagttttatgtgtctggggtattgctgtaaagcactgaccatttctttgctggaacatagtttatacataatggagaaggaataggccaaggagagatgatgatgaatgtatgctttcccctgcagaaatccctttcaaaaagagtaatactaacaaaaacaaaggcaagttgaaaatgtggtggacctcaccctcagaccaggtgagccttcagattctgcacctcgctggccgtgcataaagaaggctgggacatccctgaattcacagtcagggtggtcgtctgtgtgcagaactgaaagcaaacaagagtaagctatagccagatgtgggggctttcaggttcactgacggttcctggggtacttggagtcaaagcagctcacgcacgttcctgctttccaccaggaaacgtggagccacggaggccaaggaaatctgatcagctccagatccccaagttggtctttttacacccctaaagacaccatgcttgctccttctccaagactcataaggaaatacaaatgactttgaaatatcagccactgttaactggatcagattcctccagtaaatatggtaagccaacagatctaccttatggctcaagatccagcaaagcatctcataaaagaatatttctatgccctcatccatacatgtgtttctagagatatgttatcagtcctttctaccaagtagacagaatttttatcattacatctttgaaatcatagaaaatccttcttctcagcggcatctagttttacttaatcctgctcttcaccaaattctcagttccaaaattttgatttttttactgacttctgtcatttccttcttttgatttgactttctttgtcctgaacctcaaatcccacctgatacacaaaaactatgaatttaaaagagcatattcattgccatagttttgtgaagttaaatcaactttgcatatgaattggcataggaagatcacattcccttccatacgaatttagagaaggtatgaaagtcagctctgttagtttcagagtgtttggttcaacctttgtgtgctcagtgttcgggggtaaagggtcatctgtctcttctatgtttttttctaagttggccgagtaatttcatctttaggtctccatttctaaaattacatcctgggtttgataagattaaaagatgaagtgattaattatggatttatttaacaattgactgatttttacaaatagttcacttttaagtggctttgaacttatctttgagcaccaaaaactttattggtgttctatatgtactgggcaaatgaaaccaaacttcattttacccctattgaaagtctgtttactgaagtcactaaatcaccccatttctgacctcagctaggggttcaaactctttttcacagccattaactttttcagcgtttcaccaagcagatgtgtgttgtgtggcttaatcttttccatactagatgatacagcaggcctccacctgacgtgcgctttgatgcagcataaaaatctcattcatcatatctgatttgtcctctttgttgacatatgattaatgtaaaatggtttttgttttttttttcagagagaagagtcatgacttttgctcagtcattaaaataagagacacaaggattggtatggggtatccctagcagaatttattcaaggaagcctaatcaatatcccccatctcactatttcttcagacacgtgctaagtttacatattcgaatcaaattaacatatcagagtcacaaattggcaatggtgtcaaaatacctatcctcaccattctaaatcatttttcacattaaatatgtcaagggctatgtttgcgtgcataagtcaaaagaagagaaataaagcaatacattaagaagttggtgacataagcttatttatttagttatttatttttgcctattactggtagagaaaaatgtatttagtttgctctattacaggtagagaaaaattatattttgttgttctgagtgaaaccagtgataatcattttacctcttcttttaagtagtatagaagtctaacattttcattgcttattgccagaacttaagtgctaagattttttctatattgtctgatttgattcatacatataatgttgagattcaagaattattatcccatttaccagatgaggaagtggaggtacagaagttttagaaaagggaattagcctccgcttctattctattaagccactatatttcagaaggcatagagtatctattttgcatttgggttgggggagatggagatttgccctaactttgattcttttaggtcaagaataatttctttcagaacccggatggttttcttatttccataaaatgggttgccacattaggcctcagagtccaccaaatgaacggttcttctcttctgctgtccctcaaatttgtgatatgtaaaatatgtgtgaagatgcagataacatgtgggatctcattggctctaccattccttagagaaaatgtaattgttattgattctaactgatcattcaaaaattaagttcctccaaatttactctttttctaattgaaggttccagctgccatgggattgagatttcctatttttttttttcttgtcccgaaactctctgtcaaagattttatttctctaggcaaccagctggtttttcacatagataaggtcaattaatttgacctttggttcaatatgaaatgcataataaaagctggtgccccaaggaccggatgtggcctttcaaaaaagtaacttgccaggacagggaacaataatttattacctcataaaccccagttgaaatgcctgttgcccagcatagcaatgacaaggagcttgtgtgtctttatttatttatttttattctatgcaatagagagaggggaggaaaataaaaaaataaataaataaaacaagcacctgccccattcagggaggaaaaatggcaaaggcaaaaaagatctactcgtactgcttgaatttttgttttatagcaagttttcatccactacacaaaaattcttagagacaggctcgggaaagtttattatcaactataaaattttgttaaattgtatttcatcgcttgaattttgagagatacaggaaatctttgtgaagcgatttgaaatagagaaccaaaattgctatgtatagtcaacatccaaaatgactactaatcaggataaatttatctatggatctgtttggtggatatatttatatatctaattttaacaaattcatgaggctgtgaactcttatatttcagtttttacttaattctgtatcgctatcattctgtatgccattagcatccttcatatgtggtatttattcctttgcataaatgtgttataactggcgtttgtgtctagttttatctgatattttaaacaaccctgaatgaaactcctttacataagtcattgatcacatccttgattatgtcttagaaatgggcgatctcaacaaaacatacaaatatcttaaagctattgaaaactattctctcagtataattcaccatttctagccaccatgtagtttttaatccattccttcagctgttcctttgaaatagtacttttagtatacgtggaattatggataaaacagactgtagaaaatatttaaacctcaaaatgtagacacgtgcctaaaacgaatcttagctctgtgaatgcccttcattggggaatttttacagataatgagatgcaagttttggaactccagtgggagttttgaataaggggcaatttctgagtaatggtgtaatggagtcatagtaatggtgcaatagagtaatggtgtaataccccacagtgtggggtacaagagaagctttgagaatctagaatgcaccaggtccttttaggtaggagacaaaaaatgcagccaaagtggggaaggggtggaaaggaaaataaaatagtcctggaaacaaacaaacctattacaaaatttttacacagctacttgtgtgaccttctggtgagaatgcaacttagaatcactttcctagagagctacttgggaatatctatctaaaggcttaaataacagatactctgtctaagcaaatacaatttgaagtcttcatacccagaaaatcatcatcgatatcccaaacaactattgtaacagaatttaacttttacaaataaaaaattaaataaaatttgtttcatctttccaaaattttttatatgcaaatagtgagaaagagagagggaggggcaaacaatttataccaggtattttgtttgcaactggcttctttttattcatttaccaatatattaatggtggttattgctggtttctaattttatggtgatactaaattttcttattttttcaaacttcaaaacacaaagacaaaaagccatcaacaaatgctattttgctatatctatagatgattcagtactgcatatcaaaatgggaaaaatttcttttcccatattctttcattcagtggttccccatactcacttgtaaccgcaaactggatgtacggttaatgccatttgtgctctatttcaaagacattattagttaaatagccttctttttaagtatcttaagaacctagccacaatttatattattgttttcatgggaaaaacatgttccaagtttcaaacagctagtgtaaaaacaaatccaaaacagtttgcatgtatgttgaagaccgtctattcagttttttgtttgtttgtttttactcctgaaagctagttggtgtcttgaagtcatgaattgcctgagagtacaatatacccagtgccggaaattgtggcctgacctttagttaagaaagacttccttctagatctctgtcttacagagaccattctttccatgagaatttctttattatttttgaagttatcaattgaaatcacaatttactgatttgtgtgtgaagtaagtctgacacaaaacagggaatcatatttaagactactaagttatccccttctcattactttttttttgtttgattgtagaaaaacctctatagagccatatctctctaatacttgtattatatttatctccagagatctagcttgctcaaaaggagactattatctgactgcctgaatagatcccattacaggaaaaattgactgaaatattgtcaaatgtgttccagcaataaaattcaggtaataagttgaatttctagctttctgtgtccagatttcccctatatgattctaaacaatagttggggcaggtcaagaaaaagaggttaagagacatgatggtaaagaaagaccaggaagaggatgaaaactttgtgagtctcaggaacataaaactgccagttgtttgcagcaaaattctcacgaccccaaagctgaactttgtaaacaggcttggcatcaaactcttgcctggagaaaataaggaagaaaagaaagaaaaaaaagagaagacccttgccctgcatacagacacacacacacacacacacacacacacacacgcacacatatggcatgtgtgcactgcttaaatttgtaaggacatatacaactggcccgtttctaaataagtcttttaatatcctgagcagtttgtattaggctgagtgatagaattatttgtattggccaattatttccaactctgtttcctggagaggttatttctaatttttttagtattataaagttcctaatatgtgaggaggaggtatgatatatgatgaaaaccatgaatttaagtgttgattgggtctgagtttcaactcaactaacttactcgatttaaagttatttgattttttttttgttttgccctttaaaactgtgaaaatcatagcatgtatctcttttaattattgtgagaattgaaagacatgcacactaactgatcacacttatttagaaagcttagattaatgcctgaccacagtgagtctacaataaatattggatataattattcttgccattgttattagaagaaattgttaattgaatcagagacctggaatgaaataatccccagatataggcatcttaaccttagcaatctctttttgagtacaaaaagggagcttattttaatgtataacaggaaacatccacacttccctcatatgcctccatagttaggaatttgaacctatttctttattacaataatggaaattttcatcaaatgggctagaactaattttcaaacatggttgctatgacatctttcatagtttttatcacattataagtaaatgtgttttactcatggtcatgcctagcaataaagaaataatagcactcaatgcaaatggatggcttaaaaattggacattagatgtgaaccagggcctgacttttcatataaaaggttttatgtattttaaatgtgactcagtaatttctatttgaatgctgaatgtgtctgtctctatttttcatagacatgatgggtaaattccacagtaataaatatcttgaaaatttctgtctaataaaattaatgttatccagtaacccacttgattataatatattttctacaattgatattatatagtcctttgacatttgttgatattggctgtgatatttattaaggttatctttaataatttcatttatgagattcaaaccttcatcactttattttctcagatgacctgataaatctcttatgtctatcattttctaataatattttctatcctacaaaataactttcttccagtcttacgcttttcgatacctggtgtatttgtaagtgttgcttaatattttcccccctctctcatctcttgagacttactttaagtttttcttttcagttactttatttttttcaactctctaaatgccattattaatattttctgggttttaggttcattatatgttagatttcaaaattagaccacaagatttatgtgcctattatttcacatatattgtagtttagtcatcatgaagttatcccttgataccccagctcaactttgaccttgtgacaaaatattgttctgcctttctattcacatgggtatgtgaatttctcaccaagattctgcatcatagacttttgtgttagatttccagatacaccaacaagcctaattgaaaaaatgggaatgtgcatatttaccctccctttgtttctctcattatatgtttttgcagtttagtagataactatcctcatacttctagcttgttagatctagtagttgtggacctgtgaggtaaactcacaaaagatagattagcaaggacaaaaacagattgaattacatatgtacgtacaggtattcacatagaaatgtgtcaaaaggaaatgtctagaatttgggcctcatataccatcttaacaaaggatgataaattgtggagaagtaactatacaaaggaagggagggcactgaacttccagggcatgtaaattgtggaaatgtaagtatgaggaaaactaatggaatataagggttatttagttaagaagtgttatgtagactcaagagctttctctgttgataagaggtatctccactgacagagttgtcctcctctttctgatacaaaaaagaaagatacctttacaaatggaaatttgtgttacgtttacaaaggaaaatttatgccccgcttttagacagaaaggtggagggcagagagctttttctgtatttgctattcctaaattgcaatcagcttaaaataagccttatctcaaagcagaatattttgggctaatatacaccaatccccatctgtgtctgttctttctttctttctttcttttttctttcttttttttttttttttttttttttttgctgtctctaaacaattgagttttgaagtttggctggtactttccacatattattttttgtttttgttgttaatcttgtacttattttgtctcactggctcctgattttaaataatctgtatcgcttttcacaaatataaacagtgtaacatgtttataaaacattttcaaacatttaacgtttgtaaaatttaaaaaccacccccaattctgacatccagtgatggtccttattaacattttgatgtgttttatttttgttgcagtatgtatttctgtaagtatgtgtgtattaacaaagctcactaatactttataatcaaattctctgctggtttcatattctccattcatccacttgcaccttaaatatcagcaaactgacttgttcctggaacacgctggttcacctttacatatgcaccactgtatatagcattcctttatattatttcttcagcttagagcatcctaatcaaccccatccctaagctgaattttcattttacagtaccaaggcacccttatatttgcctttatatcaaaacacattttatatgcattataattttctttcttgtccatgtcttcagctacacacagagcttaacaatttatttttgttgttgaaatctgctgaataacaagtttttaataagtatttgttaatcaaacatatgtttcaatcattttctacctgtatcaaagtaaatgcatcaatcaacacatgtttactaacaccttgggtatacttctatgctaggtgttgtatatgctacaaagaaattaatcacaatgctgaatacagacaaatgggagaagaaagcaggtttggaatcagaagactttgctatttgttatgtgttgatgaatacatttttgtattctgcatgtttcagatgagaaaactaagattaatgcccatttcacaatatcatttagagaattttcatagttagtggtttcacaatgtgatgtcagtgtcaaatatacttgtattaaatatattttaacattaaatattttttatttaaaattaaaataatattaaaatgttagtcttaacattttaaatatttaatttaacattaaaatattattgctactattacttaattcatcaaagtggccacaatttaatgagtgtagcataaagcatttgcagttcttactgtcttgctgaaaatgcaaaatgtcaatttcagtctttgtcttaaactcataattaaaacttagaggcagttcaaccctaaatcattacaaggtgtgtgctcacactttctggaaacttggatagtgcttcttattgcattggatacctgacaaaacaaagatgttgcctacaaaaaacaacaaagttaatgagactttttaaaaatcgactataaacaaaggaaccagggctctccaaaataaaaaagtacattattttattttaaagtcttaaagtttagatagattactgaagcccaaggaactgccactccatagcttttccttcagacatattactagggtctcccatattcttaaagtgttattctacagttggcaagatctttaggttgacccttctgtgaactaggaggtctcgagtgaaatttgtatgaatcctatgagttctaaattctatttggcttacacaacgtgtaactcagcattctcacagattttagtttgcttttacttttagcatttaatcctcaaaagtttgttatatagataatgtttcagtgaacagctatttagcactattattactatcttctgcttaagattgttttcaataatgcaaaaccaaaattcaaaacccatacaaaaagagatcatcagaatgtgttcatacaattctgttatgtgagttagcattttttttgcttatttatgcaacctcaaacttttccctcatcctgtaaaattcagcattctcttgtaattcagaaattctcagtgataaagttctgctttaattagtattgaggattatttttttaaaaagggcgagagagaaagagaaggagagctgagagaataagcacaggaaattactagaataacaacatgacaactggagaggcatcacacttcaaatagacaaatagggcacaataatggatcccaaatgtttttattttttttcttaatttctgtgtttccataagaaagctagagaatagtttaagctgaagccttatcactagagccgaaaaataataaacacaaaaaactctttaagaagtaataaaatataagaaaacaatattttaaaatttaagtatgttaataaagcatttctcttttttttttttggctgttacctacttattgtttgtgatgattttactcagtaccctgtggtttcctccctggttgctttgcctgtctttcagatacttttctaaggacttccgttatttgataagtagtatcaaaattcttttttgataggttagggtctaattatatatgtagatagccagaatcaaagcagaataaatgtttatttgtttgttttatgttttgtttttttgagacagtgtctcactgtgtcacccaggctggagtgcactggtgcaatcttggctcactgcaacctccgcctcccgggctcaagccatcctaccacctcagcctcccaagtacctgggaccacaggcgcataccaccatggccggctaatttgttttgtatttttttttggagatagggtttcaccatgttgcccagattggtcttgaactcttggactcaagcgatccgtccacctgggtctcccaaagtcctgggattacaggcataagccacctcacctgactaaagaagaataaatttttaaaatgtttactttcatttgttgtttcaaatataagaaaatagtcttatgattatacaatgtagtattaataacaatttatcattgtattatttcttatacattgtaatttattgcaatcacaactttattaatataattatttatatttacgatactcatataatagtatattgatataatagtcaacatttcttgagtgtttaccatgtaccaattattataagtgaattatcaaaaattatttattttaatatttaatatcattatgagacaattactattatcccaattatagaaaaaaatgaggatcagagaggatagataacttgtccaaaatcttgtagtagtgagattataagtctagctatccctgtaaaaactatgctatgtcatatctaaaagcctatgtagcagataggacaggtatatgataatcattttgcaaatacagacacaaaaatttatgttctcattactcaacttgctcataaacactcagcaagctatctgaaaagactaaaagtgtgaggtttttttttttttttttgcttttttaaacatttatttttgattcagggggacctgggaagtttttttatataggtaaactcatgtcataggggtttgttgcatagattatttcatgccccaggtattaagcctagtacacaacagttattttttctgctcttctccatcctcctacccttcaccgtcaagtagatcccagtgtgtgttgtttccttctttgtgttcatgagttcccatcatttagtttccacttataagtgaaaacatgcagtatttgattttctattcctgtgttagtttgctaaggataatagccacgaactccatcaatgttcctgcaaaagacatgatctcattctttatggctgcatagaatttcatggtgtatatgtaccacattttatttatacaatctgcggttgatgggcatttgagttgattccatgtttttgctattgtgaaaaatgctgcagtgaacatacacatgcgtgtgtctttatggtataatgatttatattcctctgggtttatacccagtaatgggattgctgggttgaatgatagttctgcttttagcagtttgaggaatcaccatactgttttccacaatggttgaattaatttgcactcccactaacagtgtataagcattctcttttctccacaacctcaccaacatgtgttattttttgactttttaataaaagttattctgactggcgtgagatggtatctcattgtggttttgatttgtatttctctaatgatcagtgatactgagcttttcttcatatgcttggtgactgcatgtatgtctttttttgaaaaagtctgttttttaataactagtgagatttctcacttcatcacaatattttttaatttagattttctcatttaaatttcttaccactttttagacatagatgcattctttatatttcatctgttttcagatgaatattaattgacaatttggtactagatcctcctttaattttttgttcatgacttgtctgtccacagtaaaaaaaaaaagtataaatagtagcaaaatatagaaaccaatggttttcaggcattggataacaggaaattcaagtctacaattttttttttttttttgagacagagtcttgctctgtcgctcaggctggagttcagtggcgcaaccttggctcacttcatctctgcctcctgggttcaagcaattctcctgcctcagcctcccaagtagcttggattacaagtgtatgccaccatgcccggctaatttttgtatttttagtagagatggggtttcgccatgttggccaggctggtctcgatgtcctgacctcaggtgatctgcccacctcggcctccgaaagtgctgggattacaggtgtgtgccaccaaacccggcctccaattcttaagagaaggtaaacatattccctgtctctctgcctggggatatgttcatacctcaaggcagatcaaattagagctcaagtagtgaagcaatacctctgagctgataaggcaaatatgagttccaggccactaaaacaactgaaatttgctgagcaggatcacagaaaataggggctacataaagtaaaggacccagaagtctgcatgagaatttaccatgggatcttgactgagagaagttgtacaggcataggataaaaaactgtgagacagcagaaattttttcttacagagaagatggcagaatcatgataccaaaggccttttaagcatggatgatagaattttggtccaggaagagtagagaaacctctctaataaactaatatattcaagtgagatccaagaaaattaataactattaataaagactacattctaaaataaagcccacatcctaagtatcaacttaaaattgaaatcattatgtcataaaaaataataaaatcaagcttcacaatgacagtaggatctgccattattgaacatattgtcaagaaagaaagttggcacaatccagatgtcttataacacatcactgtaatgtccagaatatgatacaaattactaggcatgtgaaaaaaaaaaaaccagcgaaaatgtgactttaaaaaaaaagtcaatacaaatagatcatgcaatatcccagatattgtaattaactgataaagccatttaaagttcaaggacctaaaggaaaaaaaaaagtgacaatgagtgaacagatgagaaaactcaatagataaattaaaactaaaaaaaaactgaaattatagaactgaggagtccaaaatctaaaattaaaaagaaaaaactgggtttaagggcagtttagacgctgattacaaaaaaagctttgtcaacttaaaaacagatcaacagaagatatatattttaaaatacagagagaaaaagattgacagaaaattagcagaacttattccttttgtctaactgaaactggtgaatatagttaataacagtataacatatttaaaaattgctgagagtagatttttaaaggttctcactacaaaagaatgagtaggtttggtgatgcatatgttaattagcttgatttaattattccactgtgtgtgtgtatcaaaagatcacactgtaccacataaatatatacaattattatttgttacaattatttaaataaaatatacataactttaaaaagcaattaaaaagaaaaataaataaaattaacagagcctcagtgacctatgcaaaaatatgaagtggtctaacacacaggcagtggtgtattaggaaggagaaaaagaaggggcagaaaatatttttttgaagaaatttcctcctcttgtaaaagcaaaaaaaaaatcacctttcatatccaaggagctcaataaatgccaagaagaataaatacaaaaaaaactcatatctagacatatcaaaattatactgctatcataaaaagctaagataaagaaacattttataatgtgccaaaggcaaaaacaaaacaaaacaaaacagatcacaattcggggaacgattttataaaaacagttgacttcttatccgtagtaatgggtgctagaaaacaatcgaacaacaaatatgaagtaacagaagaaaaacagaaattgacctgaaattctgtactcagtgaaaatatccttcacaaatgatggagatgcgaagacaatgccagtcaaacaaaagctgagagaattaatggtcatcaacattttaaggatgctggaaaaagttcttcaggctgaaggaaagtattaattgatggaagtagtttccaggaaaataaactgtcctcaaaaacatagaatctagcacagtaattttcatcaaacaatggcctgtggggctcagtccagcccactgactgtattgtaaagttttattggaacacagccacgtctgtacatttatatattatctatgactactttggtcctacgattacaaattgagtttcaacagagatcatatttcacctttacagaaggaaaaattgctaagtcttattgtaggggataaaaaagcagacaacataataaaacataacaagactaatatataatcacgtatagcacaaatgtgtgcattgagaaaattcaaatatctctttaaacaaaaaaatagagctacttggaaattttcactggttggatgagagatcagaaaagtcaaaatgtatgaatgttgagtaaatagccactgcctagggcatttcatccaccagaacagaagaatggcaaatgattctttgatacttccagtgttagattcaagaagtggcatttaaaaagtatgattctcttgattgtatcagattttcaaatttactgcaaggaacactaaattttgaattaggatccccacttttatgcaaaataagtaaatacataaagcatttatggatgggtttatcctgagctcagcttttataaggcttacttccgtaaggtataaatttataaaaaatcctttcacagattggagatttgtcgccagatttgtctggctattagattgtaacagcgcaggtgggaatttagggaaataaacagtactcataaggacctgttgattaatttgagctcagcctttctatccctaatattctctttcctttctctctctgcacatctgtgacactggagtttggcccagaggaagaacgcacagtggagataaagagatgtgtgccaagaaagccgaatattcagatcagatgggatgcagatgaacatctgtgctgggaaaaaaaaaaaaaaaagaaaaaaaaaagccaaggacagatactctcccaatgttgaaataactgtacagaattctacccctacaaaatctctctttttttatagagtttttcatttaaagaaatagtgtttctgcactgcacttaaaggttatttgcctgctcctttgcaggtgtgtgtgtgtgtgtgtgtgtgtgtgtgtgtgtttcttttttcagtttaccaattcaaaggcgcaggccaacctcctattatttgtgtccatatttaaagtgggcttgacagtcagatttttgcactgacaggcacacaataaaaatcatgtactgttactagttttctaggcagaattatttcataacaattatcttcacatctccaatgttctgtgtgctcaaaaccag

SEQ ID NO: 4 - DNA, 599 bp, Homo sapiens
ccctgacctcaggtgagccgcccgcctttgtctcccaaagttctaggattacacgcgtgtgccactactcagcctagcttcgttcattctatgctataatgtaaaagaatctggacattgcatatgaatatatacaggaggacactcctgaagaagttatctttttccttcctggcagagtttttaaccttaaaaagccagtttcttaatggctttttccacacagtcttcaaagaaaattgctgtggtcattagcagtgggtggtgtatggagatttaattgaggacttagaagcaggycaagtgaatgctcgctagtgtggtagaggctgcttagagaacactgaagatggcgttggatgtgtgagaacagagaggaaaaccaagaaaagtaacaaagatggtaaaatgtacgcttattttattgctatcatctgccttaagtggaaattttatttatttattaatttttttacttttagaggtagagtctcatactgttgccaaggccgcagtacagtagcatgatcatggctcactgcaacttaaattcctggactcaagtgattcccccaaccacagcctcctcctgagtagct

SEQ ID NO: 5 - DNA, 599 bp, Homo sapiens
tacaaggtggataatactgaataatggctaagattcagaataatatatactagaaactgcatgcataaattccctggtcaccattaacattgtgtttttcttaatgcctgaaataacatctaaacaaggggcagctgcctcaggcaaatggtacttaggtgattttaaagaccttaatgagatcaggtaattgcttggtgaagctaaaaattttaccttcaattaactgatcaacagcaccatacatcatcataacttctcactcccttccacctccgtaccatcaagtcatttcctctrgacgtctgaacctgcactcagggtccattttttaaacatttattgaattagtctggtctaatctacaattaatggaaagtctgtagtaatgcagtttccataagcagctaaggaaagttgaaactttgaaagagcatgtaaagtaaacactttctcttccttctacacttctttgcaattcataaaatactttcagaaatcatttaaaaaatttggatttcctgcttccattttctgaatagatgatgctgataaaaatagtagtgatcacagcccatcccaaatagtgtcattttttt

SEQ ID NO: 6 - DNA, 599 bp, Homo sapiens
gtcaatgtacaaatgttataataaatagaaataatgcagaaaaatgtgtagggtgagaaaatcagaaagtaaaacacattctttggttggcaaaagtcaggaataaaaggatactattgaacactgacaaagtagatggtaaatgtttaaacaggcaatggaaaccggatacagtggctcatgcctataatcccaacactttgggaggccagggcaggaggagggttgcttgaggccaggagtttgaggccagccttggcaacatagtgagacccagtctttacaatcaatcaatcaatsaataaatctagccatgtgtggtgacacactcccgtagtcatagatactagggaggctgaagtgggaagatcccttgagcccaggagtttcaggttacaatgaactacaaccatgcctcatgacactgcactccagactgggtatgaggaagaccctgtctcaaaaacaaaaacaaaaacataggcaatgaaactacaggcatttagaagttataaatgaaaagttaaccactcaaaatatgcaacttcctaaataacactttatttatttaaagaaaaaaacacatgtcacaaagaaac

SEQ ID NO: 7 - DNA, 599 bp, Homo sapiens
attaagactgtccagtatatgaaaccttcaaacttgagaatatataaacagtacagacattatggaccatagtactcactcaggaaactaattttttatgtgatctcacatcatccaagtgcatgactcagttcagtcaaatgcccagaatataaatggaagcaaggctagtagtaacagtgacagagcaagttgttataagaagaacttccaattatgaagcatccaaaaatggaaatttctgcctcttcaagcaggaagtaaatcaaatttgaaaatattagggaaaaaaagcctggragtcttcaaatgagatacatactttggatgagggatttgccaagatggccattgtgattctagagcgttaaacaaattgtaccttaaaattgtataatgtagacagtcgtgtgtgggccaagtaacttaatgaaagacaaatagagtttcctttttctttgtgtcattgagaaaaatatatatattttaaatttacttctaggaatatttactaattgaaaataattcataaatggagtcaaatagagttgacaatgaatgaataaccaagagtagatggaaagagattagtaaagata

SEQ ID NO: 8 - DNA, 599 bp, Homo sapiens
ggtaatgctgtatattgcaaaatcacagtttatacttgaatcactagaatttttgactcattttggtgaacttgattcactaaggttggaaaattacattttttaaaatggtggaagacaattgggtaaaaatgcttgtgttgtgaagttagatatttctctgttttcttataagtaaaatcaagaatttcaattagtagacattttaaacacttgctatgtctaacactgtgtgggttgttaattattttttttaatgtaccagtagtttcttttcttaaggaatttattattttgtaygcaacctagctatggctgaggactccataagaactgagattttaagagaacttggctaagtatttaatctgtattgtgaggttcaaaccaacttgggtttcatcatatgtatgcatttcgattattaagttgttaaatattttggagagttttgctctttagttttgcttttaagatgcaacagaaaagtcaatgtgttacatatgtttttgatatgtgtttgataaatttagaggaattaaattatacatggcatgattgcttaaggaaatttaaaattttcagcttgacttgatcaa

SEQ ID NO: 9 - DNA, 599 bp, Homo sapiens
tctgtacctccacttcctcatctggtaaatgggataataattcttgaatctcaacattatatgtatgaatcaaatcagacaatatagaaaaaatcttagcacttaagttctggcaataagcaatgaaaatgttagacttctatactacttaaaagaagaggtaaaatgattatcactggtttcactcagaacaacaaaatataatttttctctacctgtaatagagcaaactaaatacatttttctctaccagtaataggcaaaaataaataactaaataaataagcttatgtcaccaayttcttaatgtattgctttatttctcttcttttgacttatgcacgcaaacatagcccttgacatatttaatgtgaaaaatgatttagaatggtgaggataggtattttgacaccattgccaatttgtgactctgatatgttaatttgattcgaatatgtaaacttagcacgtgtctgaagaaatagtgagatgggggatattgattaggcttccttgaataaattctgctagggataccccataccaatccttgtgtctcttattttaatgactgagcaaaagtcatgactcttctctct

SEQ ID NO: 10 - DNA, 599 bp, Homo sapiens
aacaatacagaaactgaccccagattcatcactttacaaccctttcaaaatatccaaataaataaaatgtctccatttactcaaatgtttagttttaaaatacagattgtattgaaaaagtctgatatattattttctccatagtacatgttgcaaactaattttttttagcaaaaatagctaacacttagtgaatatatactttattctaagcactctccaagctgccttctcacttaatcttcacatgaacccaattagtacatactattgttattaaggttgttaaaatgggaaaartaaggtgtggaaaggttaacatgacatacctagggtttcatggctaatatgaggatgagtcagattagaaactggtaagtatggtattacaacctatcatttattatttcattaacgtcgtcacgcttaccatgctggctaaattaagttatctgaaagactattttgttcttataagagtgttggcgctattaggcaagaatattttcttcctatgtaagactgagctggaaaaaggggattcagaactgtaatcatcgaggaaacttcttttcctaggttatagggaaagaggaaca

SEQ ID NO: 11 - DNA, 599 bp, Homo sapiens
gcatgagctttaggatcaggccttcagcagaggaaggagaagttttgcttgctggtttctatgcatatttatccagagttcatcccatgagacattagccctcttagagttccaggatgaaaaagagtgatcacaaaattttctgccatgtcacagaaaagcccagggatgggccacaggaatgctggatgggcttgatgtatggtggtgccaagatgcacctgcaggaagccatttggggtccatgcacaggcccatcactgaagctgtggccaaaatcagagaacaaaggggtttagyggatctgatatgatgcatgaacaatgtctaacatgggtgctttcctgggttcactggaggagattcaacttgggccctccaactcaaattctaggtgtgtgccctgcctcctcttcagacatttgccttctgaaagcctggcccttgggaggctcactttatagcacatatcacctctcatatattggagtcccattttcctcatcctgatagtccttttgagcaggacttcaatagctccagtccagttcactctgcaacaaaagtctgcattgggtcctagaaaaacagtgacatat

SEQ ID NO: 12 - DNA, 599 bp, Homo sapiens
tatgttgcacaggctagtttccaactcttggactcaagcaatcctcctgcctcagtctgggagtcacaggatttacttatttaaaaactcaattgtttaagggaaagagttaaactctagtgtgcttcattgatttcctctgccccttttgctgttttatgacaattcctaatttgttcattaatatttctagaaagatgctatgttgttgccatataataatatcgataatagtttggctggttgactgtaagtacaaataacatattcattttccttaaaagtctgttagtttaaccrtgtatctgactggccagatagtcttgtctatttggcttctgggaacggtgtcttcccagtgtcaacgttcctatctgccttatttatgtgacctgactgaccagaaatcctaatgtagccatcttgctccaaaaggttcttggtcttccctaccttgttacattacactcatcgtcttcttgacttactgtacactgtttgctctcttttctccctctcttcttggtgagcaactcaagagatgcctcaaaggttgagagaagtgagctgggcatggtggctcacacctgtaatcccag

SEQ ID NO: 13 - DNA, 599 bp, Homo sapiens
gtgttattttttgactttttaataaaagttattctgactggcgtgagatggtatctcattgtggttttgatttgtatttctctaatgatcagtgatactgagcttttcttcatatgcttggtgactgcatgtatgtctttttttgaaaaagtctgttttttaataactagtgagatttctcacttcatcacaatattttttaatttagattttctcatttaaatttcttaccactttttagacatagatgcattctttatatttcatctgttttcagatgaatattaattgacaatttgrtactagatcctcctttaattttttgttcatgacttgtctgtccacagtaaaaaaaaaaagtataaatagtagcaaaatatagaaaccaatggttttcaggcattggataacaggaaattcaagtctacaattttttttttttttttgagacagagtcttgctctgtcgctcaggctggagttcagtggcgcaaccttggctcacttcatctctgcctcctgggttcaagcaattctcctgcctcagcctcccaagtagcttggattacaagtgtatgccaccatgcccggctaattttt

SEQ ID NO: 14 - DNA, 599 bp, Homo sapiens
acccaagcataattgatataggaaccccattaggtgcttttagcattactgccacctgagcaactcatcctgaatttcagcaggactatttgtctttttaatcaaggtgaagaggttaaatagtctcttaaatgacttttgcatacaacccataacagccttgcactgagataacgtgataaaaatatttatttccatagaaacagaaccatgtccatacctgttttagtctcctccatttagcgcgtcgattctgaaaccaggttttgacctacaggaaagagagaaagaaaacttgcmacgagcccgcgtcgggacgtgccagagggcagggtggctcctcgcctctctctcggtggcccggcgacccctaccccagaagccttcccttccccggaggcggccccaggccccccgcgagctcacctgtctctcgctgagctgcagcatcttggccagacgcttcctctcgggcggagagagatatttctgcgtctcgaatttcttctccagctcgatggtctggtcgttggagaatctcacctggccgcctttccttttatgcagaggcctctgcaagaaggggctccagagtagag

SEQ ID NO: 15 - DNA, 599 bp, Homo sapiens
gaaaaaagttctagagatggatgatggtgatggttacacaacaacgtggatgtatttactgccaccgaacaatacacttaaaaatgctcaaaatgggccaggtgcagtggctcatgcttgttaccccagtactttggaaagccaaggtaggaagatcacttgaggccaggagtttgagaccagtctgggcaacatagtcagaccccatctatacacacacacaaaaaggtcaaaatgataaattttatgttacatattctttatcacaataataaaaccaaccatgatgggggggtgggrtgagaaacaatcaatattctaacaaactaacctaacaactataaatgagtaacataatcacattgaaggagtgtaaaagaaaagaacttaactatggaaagctggattttgactggatacaataaagcctaagagaaaaagaactacatgcaaatattgtgacctattttaaaaatgtttctcacaggtgagctagcaattatgaaactatgtgtacactagaattgaggaaataagaaagtaaattgtagaaaatgaaatccagtgttctcattgttggaaaaagatgttataaataa

SEQ ID NO: 16 - DNA, 599 bp, Homo sapiens
gcttcctcaagttcatgggatgcctctgtagctcatggacccgtggctcctggtgtccaccatgggaatcttggtaggtagaaaaagaggcccttcctcaaggctggtagagccccaggtggggccaccccttggcaaatggggcacaagcaggatttcagctccagccagctcttcaaccagatgtctttgtgcagtgcacaaattgcacaactgtacacagaagacctgtgtagctatcagagtaattttgaattacacatcttgtcccttcctttgtccagtcagagatgaaagcgrtactgctccagggtagtcaggaaacagagggcaaggaaaaaagtagaggggagtgtcagagaagaaacctctaaatagtggaggtgactattttgaaccctcagcgtcagctgctccatcttactttgctcattgtaaacctatggtctcagttggaaagccaagaggatgtttatatagggtggatccaaccacaaactatctgaattactgttggagaacctgactctactgtgctccataagagtagagacaatatttatttcattcactgttgtctccccagctcttaacatggt

SEQ ID NO: 17 - DNA, 599 bp, Homo sapiens
gatttggaccactatgcttaaagctaatcagcaagtgattctgactagcagaacacctttgaatttgagcaaacgtactgtggttccaattgttgtcactcagaggtacaagaagagttgaattaattctcagtggcctgagtaaagatctagaggcaaccactcacatattttaaaataataataataattctcttggaattcttccaggtctgttttattaacttcctactttctatactaaaagaaaaaaatagattagtaatattgttaacctgatgatgatagaagacttactcyttttaaacaaattttcaccctttctaacagtttagctgaacatcctgaagcaagcgagggaaaatataaagcattgcaaactcaaaagcacatataaatcaagtcacttaaaataatggactcaagaaaaaaaagaaaacatgatattcctggtgaagcttttgttttcacaacaaaattttccctggttacagaaaaatatttctgaagtataaaaaagtgaaggcataaacatgataatgaatgacaactggcatcttcattatggggatagaagagattggtgtggtctgtggcaa

SEQ ID NO: 18 - DNA, 599 bp, Homo sapiens
agaactttttctgtgtctctttcttattagattttaagagtttgaacttgaggttatctgcatgtcatagaaaacctaaaaagtagaggcttacatgacttaggggatttatttttcgtacatattgcaaagtccacagttaggaaattgctggctttgctttaccagtttaagggtgtgaggattgaagtcggttgttttaaaggtctttcccttttggtgtcaaatggttattgctctctggccatcacatgcactttcccccacaaaaaagatggaagtaccaaactggatgtgccrgctgagtctgtcccttctttaaaggagctttataggaagtcccgctcaaaacccgtgcttgcatctcattgtgtggagtcatatcacaggactacctctatttgtaagagaggctgggaaatgtagtgtttttttttcttttgtttttatactgcacacattgttgctcccaacagaattgggattctgttagtaagggagatggggctaatgtttattggcttgatatctctgctatagggtataaactttgggacaagatacacattttatttatctttctatcatttatcaggtcc

SEQ ID NO: 19 - DNA, 599 bp, Homo sapiens
tggtgtgatcttggctcactgcaacctccacctccagggttcaagcgattctcctgcctcagcctcccaagtagctgggattacagtcacgtgccatcacacccagctaatttttgtatttttagtagagatggggtttcgccatgttggccaggatggtctcgaacccctgacctcaggtgatctacctgccttggcctcccaaagtgctgggattacgggcgtaagcctccgtgcccagccgagaaatgttgattattaggctgagtagtttgaactcaacaaaggcaatgtaaaatracatttcagggactgcttagtgcaacaaaacacttacatggggccattagaccctaactatctctattagacttagccctgagggcaagtacaataattcagcctgtatattcactgccaggcccacagtaagcatttcaagaagagtatgagaaaagtggatgtgaccaggcatggtggctcatgcctgtaatctcagcactttgggaggctgaggtgggtggatcacgaggtcaggagttcgagaccatcctggccaacatggcgaaacctcgtctctactaaaaatacaaaaatta

SEQ ID NO: 20 - DNA, 599 bp, Homo sapiens
tgaggctttaaaccaaaaccaagccttcaaaccataatctgtaaatatcagatatctgaaaaacagcttctggtattcttaagactttaataatgactgtctaaagttttattaaatgagcttattataatatgacagaactcttataatagttaacatttattgagcaattcactgtgtttattcctcccatcaatatagatataaattctattactagtcagatttttaatgaggaaactgagaccctgtgagcatctaatagtatgtagatcatcttgcagaaggtggtagtgatcrtactacctgaaaagcatccatgtttgagtggctcttttgtgtgttttttggcaacttaaaactgcagcattttctcatacatctacatagggtatttcccttaaacccgttgagaactttttaggtgtatattctaaggctgatcccctttttataaatttgctgttttgaaatgcttaaaattgttagacagctctttaaaaaaacaatacaaaaaaatctgatctgaaaagtatcttagcatgaatggtttggctttcctggctttaaggaagcaagttcagtatgtgagctatttc

SEQ ID NO: 21 - DNA, 599 bp, Homo sapiens
agtgttgggattataggcatgagccactgtatccggtttccattgcctgtttaaacatttaccatctactttgtcagtgttcaatagtatccttttattcctgacttttgccaaccaaagaatgtgttttactttctgattttctcaccctacacatttttctgcattatttctatttattataacatttgtacattgacctacttttttcctacttttgtgcattgctacaatgcatagcatttgtacattcatctttggcttttgacaattaatattcccccctgtattttagttttrgatctacagttatgtagcaatgagctcattatcagtccttttgctgaaatttccccagacctctcttggttgcatgaagctcatcctgttttatttagattcttcaagaggggattatggattcttgtgtgttaaaaactttttatatagccttgaaacttgaaggataccttggttgtttttaaaattcattattcatacttttattgaatttctaaaaaatgcttttccattgttgcattatattttgttttagacaactctgatgccagttgaatttatttgccttcgttcattat

SEQ ID NO: 22 - DNA, 599 bp, Homo sapiens
gctcttgttgcccaggctggagtgcaatggcgcgatctcggctaaccaaaacctctgcctcccgggttcaagcaattctcctgtctcagcctcctgagtagctgggattacaggcatgtgccaccacgcccggctaattttgtatttttagtagagacagggtttctctatgttggtcaggctggtcatgaactcccaacctcaggtgatctgtccgccttggcctcccaaagtgttgggattactggcgtgagccaccgtttccggcaattgacagtcttaccatgaccacgtggtacrtatgttaactataatccagccaatccttgatggattgatgtttggtttatttctaatctttggttcttactgacaatataaagctagctgagatttgaacacagatttttcggatacccagtgcataatttgtcatagctgtaatgaatacattacagaggaaaggagcctggctggctgccactctgttaattgaatgatgtgaatggaaggatgggaatccagcaaatgagaaggaaaattcatcagaaagctttgaggacaactgaaagaatgtaagatccttaacactgcaactc

SEQ ID NO: 23 - DNA, 599 bp, Homo sapiens
gaggcagaagaattgcttgaacctgggaggcagaggttgcagtgagccaagatctcaccactgtactcttgcactctagcctgagcaacaagagcaaaattccatctcaaaaaaaaaacaaacagaaaaatacctcttcacagatagctttcagatgccacatgcaggagctgtgaaaaaaggggggaaaaatagagcagaaaaataatttgacaaaattcaacagcctttcacggtaaaaactctcaacaaattaggtatacaaggaatacctccattgtgtacttcagtacaataagrgccatggaagacaagcaaacaatgaacgtattcagcagtgaaaagctgaaagcctttcctctataatcaggaacaagcatgacaaggatgcccactctcatttctattcatcaatgataattttctgattctgatggtattgtgatgatatagaaaatcacactaaagaggccgggcacagtggctcacgcctgtaatcccaacactttgggagctgagatggggggatcaccagaggccaggagttcaagaccagcctgaccaacatggtgaaatcccatctctactaaaaatacaga

SEQ ID NO: 24 - DNA, 599 bp, Homo sapiens
agagagaaagtgaagaggaaagcactgcacacttttaaacaaccagatcttgtgagaactcattcactatcatgagaacagcaagggggaagtccatctttatcactcggttatctcccatcaggtccctcctccaacatgtggggattataattcaacatgagatttcagtggggacagagaaccagaccatatcaagatgtgtatatagtagttctatgccattttgtcacttgtatagatttgtgtaaccaccactgcaatcaagatacagaactatcctatcatcacaaggatctytcttgctaattcactgtagtcacactcacctcatcttttccatgattcctaacccctggcaaccactaatctgttcactttttaaagccctggagtaatttgttcaaaggaaagcttttattgaggcccattgtataaaacaacaataataacagagaaaacaaggggaagaaggcaagtgggatgctaaggactataacttgaaaattcctgattgtgtttatccttgaagatattaggaagcaagactttcacagagcattttttaaaagttaatagtgataaaagatattagacct

SEQ ID NO: 25 - DNA, 599 bp, Homo sapiens
atttatttcttttctttcttttctttctttctttctcattctgttatccagactgaagtgcagtggcacaaacttgcctcactgcagcctcgacctcccaggctgaatctatcctctgctttctgagtagctgggaccacaggtgtgtgccaccacagccagctaatttttgtattttttgtagaaatgaggtctcactatgttgcccaggccaatctcaaattcctggggtcaagaattccacccgcctcgccctcccaaactgctgagattacaggcgtgagccactacccccagccyggtcttgttttcagtggtaaattagtacacgtgttttccctcaacattggggtgataaaatagctctggtatatatttttaccatttaagtttttattcaccacctttaaagttttcctatttcttttctccatttagttaataaattaagtagactattctggtaagtgcctctgaaatcaaaaagctttcaagtttttcaaaactgcaagttggccgggcgcggtggctcacgcctgtaatcccagcactttgggaggccgaggcgggtggatcatgaggtcaggagatcgagacca

SEQ ID NO: 26 - DNA, 599 bp, Homo sapiens
gctattatagggcaacttaccgagatggaaattatcaatgaattttaaatgtatgtctaaccaacattaatattatatcaagtttatgttacattgttctatatgtataatttgtcacaccccaatataattttaattattagaaagctttatagctaatttaaacataacatttgtaatgttcatgatttgttttacatactaggcaagggaaactgcttaataacagaataaatgactgattgtccaatttagggactagacaagaggctgtagtagatgccctgaagtaacattgcytagtaagaggaataaaacaagtagacagattttgaaagcatcataactggaggagggttgtgaaaggtttcatgagcaaagatgatcctttcaaaggtcatttaatggcaatgctgtgaaaagacagtggccaaggcatccattctcaatgcagaagatttactaagatcacgggccctggagccagactgtccacgttcagatctgccacttaagagctgagtgatcttgggaagttatatatcctttgagtcttaattccccatttcaacagtgtcattctcttttcctataggaaa

SEQ ID NO: 27 - DNA, 599 bp, Homo sapiens
cttgtataaccgttgacaaaattaattagcaacgctaaaaccaatgaaaacacattactcttagttcttagagtattaaagaattcagtgttgactttcaaactattatctttgccttatttgttaatgtattgtaattgaaactaattaattttaaatctaagctttaatcatgtaacataacatttcctagagtgtgttccatgggatattgatgagcattatgtaggtttctgtgatcaaataagtttgggaatattttagaaaataataatatcactaacactgtattgattcctrttgtctttcccatttccactgctgctgccttaggcaaggctttcattagcacttccctgagatgttacccccaccctacctccaactgtccccatctctgtcaattcactttagttcaactggactcatcagttgcctactgtgtaatcactggtacctgtgatctcaccaaaagtatctgtcctaaaactcgttttacatttgtagttctcaactgggggcgattgtaccctccaggagacttggcaatgtctgtagacattcgtggttgtcacaactcaggctggagcaagagatgt

SEQ ID NO: 28 - DNA, 599 bp, Homo sapiens
agaacagtacagtcaagggggcaggtcttgcagtaagcctgacggggtttgaatcctagctgtatgaccttaggagagttgcagagcttctctgagtttcagattccttccgttataaagcaaggataggaatagtatctactgcaaaaggttgttgcagaagtccaataagagaaggcacacatagtgcttagaatagtgcctggtacatagaaaatgctcactgaaccttggctattattttccagaaatgtttggagatttttatagcataggcaagaaactttgtggcactggttrtttaccattttaaaacgtaaaaaaaaaggaaatatttgatttgattaatagctgaactgacaacgtgcaagaaccatttaataatgaccaatcatgaaaggttatggaaaaagaaatgatttaagaaggccaagagccaggccaaggtattggtaagccctgaactcatcacatgtctggagtcgacagttcaatcagttctagttttgaatatgggcaggagctttttgtaaaaaaaaagttttggggcaatatgcatatggctttcttttctttctttctcttttcctgccccctgg

SEQ ID NO: 29 - DNA, 599 bp, Homo sapiens
tcttttgtctttttgataacagctatgtaggatattctgaaaatatatttaaaatattcttatttttcctagtcagtatttcctgacttttctcctctaggttgcatgtattgctttagtaataaacaaaagcattaatgaaaacttcgttttgaaaaaattggatctgggatagaatttaccattttgttgtgggtttattttctgatatggatttattttactatttcacttgtaattttagtttttctcaacttaggtaagaagacgaatgagaaggtgagagacagctagtgcgtrctcatgggatatgacatttgaagggaaaaggatttgatagaatctcaggcatttgataaagagttatttggcacttgcagtaagctaagcactgttctggtttggtgcacactgtgatgaataagagagtttctcagccttgtggggattggggagataggaactaactaaatattttcaaaataaaaacaggatttcaggtttgataggcttgataataagcatgcagcataaagtaaaaaggagtgatgaggtcaaatggggcctattttatataatatggtcagggaaaccatttg

SEQ ID NO: 30 - DNA, 599 bp, Homo sapiens
ataaaataaaataaagaaaagtaaaaaatgtagctgtgaggtgatgggcatgttaatttgcttgactatggtaatcaccttggcatgtatatgtacctcaagataagtgtagcaaaacgtgttacacatcttaaatatgtacaatttaaaaacaagacagaggctcaggaaggagaaataactcgctcaaggtcacatagctagtaagtggcagagcctgagttcaaaactgagcagctgcctccaggttgggcttgtcaccactatttcatgtaccctctaaattcttgtggggaaatmagggtgcttattcaatccatgctgcatatagaggttgttagatggcgaatacttcttgtccattttttgtttcaaagatggggtttcccccaaatacccctggcctctgtctcacctttactcaccctctggggagatgagcgagttgcttgagtgcgagaagaaagggcaggcatggcctagtcttttaactacacatcttgttctgctcctccaggggcaggtcttcctagttgggtgaggttgggggaggccttcagagttctagtgctccagagtatgtgagtctgcctatcttt

SEQ ID NO: 31 - DNA, 599 bp, Homo sapiens
taagcatgtatattatgtatattaaaaagttacgaatcattttgttctaaatcattacagcattttctctggaatatagcattttcagaaccacaatgctcattgaaggaattgaagaaaaataattataattttattcttagcatttataattgatttaataaaagcaacatgagaataatttaagaatgagtaaaaacaggggttttgtttgtgagtagcagagggtccctaataatagggtattaacaatgaaaatgtatttctcttttacttaagcaaaagccagagataggtagmtgaattcatcctcagtttcatattcgctttttagccatgaggacagagccagaggttgggaagggtacacggctcttaacccttcaaggatactttttgacattgtcatactacttctactcacatcccattaattagaaataagtaatatgtgtggctaacaatcataggaaaaaaagctaaacatcactaattattagagtaatgcaaatcaaaatcacaacgagataccatctcataccaaccagaatggctatcattaaaaagtcaaaaaataacagatgttggtgagattgtgg

SEQ ID NO: 32 - DNA, 599 bp, Homo sapiens
tttccagaatggatgatgactcttgctaaagttcttaatgacacaaagtatgttcttccttccattttcacagaggttggattcctgaaactgtacaagaaatacttaaaataagtcctcacttaatgtcaatgataagttcttggaaactataattgaaacgatgtatagagagatgagtttttttttttctaagcaatgttataaagaaactgtcgaatgaaacaattttattccaggagctactatatgtaaaatggagataggttctaaggagatattataaatatattttttacrtatatgcatgttaagtggggctttcagaactcatgcaggtcgtgtggaattctctgtacagcatagatctgtgtagcggaagacatctagcacctctgacttcggcctgcttaatggcagttgcacccccccaattagtattatatccaaaaagatttggatttaaccacttactgattaaaatttctatatggcctgaagcacacaaaacaagataaaagaaaaacaggagaatatggatgtgaaggtatatatgacattatgtttataagtttaaataaatactattaaagagctcc

SEQ ID NO: 33 - DNA, 599 bp, Homo sapiens
ctcctccaacaacgggaattacaatttgacatgagattttggtggggacacagagtcaaatcatatcacaacccaagttagatttcccaacttgaattcctttaaagcatctgagatttactatagctgtgctattctattagactgcattataatttttagttggcttgtgtttttccttctgaactgtgagctctttttaatttcaatatcactagtgctaagtaacataacctctcagatgcttactgaattgatttaaatcttctatttactttttccttccacttaaaatagtarctcttttctttttctttcttttttttttttttttttagagacagggtcttgctatgttgcctaggcaggagtgcagtgactttcacaggtgcaagcatagcaccctgtagccttgaactcctgggctcaagaagtcctccagcctcagcctcctgagtagctggaactacaggtgcacacactgtgcctgtcttatattttattgagtaatgtgttaggtacttttatatactttgtctagtttaatcccactggagcttaggaaacaagtttagaggagttaagtatcttgcccccat

SEQ ID NO: 34 - DNA, 599 bp, Homo sapiens
tttttattttcttgacaatatcttttgcagagcaaaattttataattttaatgaaatccagtttattgattcttgtgttcatggagtgtgccttttgtgtaatatctaaaaagtcattgtcaaacctaagggcatctagattttctcctatgttatctcccaggagttctgtagttttatgttttacattgaggtctgagccatttcgatctaatttttgtcaagaatgtaaggtctgtgtttagatttgtttttttagcatgtggatgtccagttgttctaccaccgttttttgaagayggtctttgtaccatcatattgctttcgctccttggtcaaagatccgatgattgtatttttgtgggtctatttctgggctctttgttctgttccattgatctgtttgtctgttctttcatcagtagtacattgtcttgattattgttgctttgcagaaagccttaaagttgagtagtgtcatccttctgactttattcttctcttttaatattatgttggctattctaggtcttttgccttgccatgtaagctttctaatcactttgttgatatccacaaaataacttgctgggattttg

SEQ ID NO: 35 - DNA, 599 bp, Homo sapiens
ctgtcactgtctcccatcacccccagatgggaccttgtagttgcaagaaaacaagctcagggctcgcactgattttatattatggtgagttgtgtaactatttcattatatattacaatgtaataatagaaataaagtgcacaataaatgtaatgcgcttgaatcattctgaaaccatctcccacccaatctgtggaaaaattacctttccctcgtgccaaaacggttgggggccactgaactaggacatccagtatgatattgaaaaggagtggtgaggggacatttttgtctttgttmgtgattttagtgggaaagcttcgagtttctcaccgttaagtatgatgttagctatagatttttgtagtctttttaactagttgaagttactctatatctcgttcactgagatcttttatcatgaatgggttttggattttgtcaagtgtgtctgtcaatagatgcagaaaaatctattgctatgattatgtgatttttcttctttagcctgttgatgtgatgaattacattaattgattttcaaatgttgaaccagccatgcaatcagaggtaaatcccagttagtcatggtgtataat

SEQ ID NO: 36 - DNA, 599 bp, Homo sapiens
ctggagtgcatggtcacagctcactgcagcctcgacctcctaggcacgggtgatcctcctgagtaactgggactgtaggcactcaccaccacatgcagctaatttttctatttttggtagagaggggattttgccatgttgcccaggctggtcttgagctcctgggctcaagtgatctgtctgcctctgcctaccatagtgctaggattataggcatgagccaccttgccctgcttctttctctagatccaaatttctgacctacatcatttttatcctatgtaaaggattttttttttwaatttcttgcaaggtagatctactggcaaaaaaatctctcaatttttgtttgtttgagaaagtatttttccttcacttttgaagaatgattttgcgggttacagaattctatgttgttgttttttctttttttttatcaacactttattttactttaccactcgcttgtatggtttctagcagaagtaaaatgtaattcttatctttgcttctgtctagctaagggttattcccccctcaccccccacctctggcttctttcaggtttttttctttatctttgactttctgtagtttgc

SEQ ID NO: 37 - DNA, 599 bp, Homo sapiens
tgtagatggttaatatccaaaaaacaaaaaggaaaaaaaaacccaactcttttatgtgctctaatgtatttgctgttgaaaacaaagggaatttgtgattcatttaaaaaatatatatatagctatttgatgattttgaagatattttatagttattgttccatttgaatgaagtaaaaatgttatgatgtcttagggtacaattgagctataattttagtatgtcaatgactacagcttttttctagggaaggttataatagttaacaggaaaatatgacataaatagtaaaaacatgrtataatagtaaaaattagtaaaaaatttttgttttgggctgtaagtttttttggagaggagactgtagtaagtgtaaaaacatgatgttatataattagttttacacatattttcaggaatatttttaatacacaaatgtgtggatatagtctattttggtgtgaatttaaactttgaaaactgctaaaagtttcagttacttgagaaatagtgaatttttatttaatgatcaaattaaacactaataaaattatgtctttattgttttcagttttgagagcatttgaaaagtgcaggc

SEQ ID NO: 38 - DNA, 599 bp, Homo sapiens
ttagcagcagaattacaagaaatcttgggacctgtagtcttaattcaagataaggccatggggcctgaggcacccctagaccctgagccttcaccgttaggatgggcatccccccgttcctaatagggtatggtatacagataggtctagccggggtgcttctgctgcctgactgttgttgcagcccagcctagtactaacaccatatggtatgaaaccaggtgtaaacagagtagctaatgagctaactcagggcagtgtgaataataaccaccaaaagggtgacacctgtggtaatcygcaccaatagctgggcagtttatcgaggcttatgtatgtcatgggcctgtgtgcctaaagcctacgtgtcaagctactgtgtcaagcctgtgtgtgtatatctggcctgtatgcccaaagcctacggtcaggctaatgtgtgtcaaacctgtgtatccaaaacctacgtctccctcggcctgggggggtggagtgtaaggcatatggacgtgctttggtcaaggaataggctgaggtggatatccaggcctgcatgagtccagcgagtttggtgtgcaggcgcacacctccacttgtta

SEQ ID NO: 39 - DNA, 599 bp, Homo sapiens
gctcagcctcctgagtagctgacaaccgcaggcacacaccaccatgcccaactaatttttgtcctggctacttttactcctaaaccttctccttctccataaacatcatatttttcataacttctccccttccactctttataccagcaagacgaatgttgccccagtggccaaatatgtgttatttcacattgccctgctctaattaaggaggtgtgaagaaggaaatgctagcaacagcaatgataactcaggtggctttgtgtgtgtgttctgggagtggagtgtctttaagtgagmatattggagcacaggatagacaggaagagctccagtgttagtaaaattatgaatcattactatgttggggacttctagaatttaggtccaaaacaattctcctgtggttgcaatccattataagtcattcaattaataaagaatgaaccaattaatggaaataatataaaccatagacttctgaaaaagtggtaaggatttttgaaatatatcctaatgtgcaccaggagtcaagtaacatggacagagtatttactcagcacataagttgttaggcacagattattaagactaaagaa

SEQ ID NO: 40 - DNA, 599 bp, Homo sapiens
gatggggactttgccaaattgagagctcccgttagtttttcttcttggttttatgagcccatgacccatcttgattctttcttgcctgatgaggttttgatagactatagattggcttacctgacctagaaacttgtgatttttactctggtagatatccataccaacctaaggggcctaaatccatgccaacccttgatgccctgatactggatcctacataaaaagagagtttgaacccagtatttctaagatcctgatgtttcaaaaacaatgctactttatcttatgaatcatttrtcacttgctccttcaggcaggtaaatataatgaggctgacagcagccaaggccatgctgctcatcatacacaatcatgtcaacctgctgtgaaagtctgtgccattttccctccatcacatctgtcttgttctctttgccgaaagctgagttactacatcttggctgattcagaattttgtctagttctttccttacaggttccccattgtctctttgatactattttatacctaaaattcctctctatttgtttaatgcaaatcagaaacctaaggcaagggacagctggtcaccaaa

SEQ ID NO: 41 - DNA, 599 bp, Homo sapiens
tatatatttacagggcacatgaggtgtttcgatacaggcctccagtgcataataatcacatcatcgagaatggaatatccattcccttgtgcatctatcctttgtgttacaaataattcaattacactgtttaagttgctttaaaatgggcaatttttattgactatagttatcctgctgtgctatcagatagtaagtcttatttattctttctgtgttttttgtacccattaactatccccaccttcccccaacaccacactatgcttccaaacctctggtaaacatccttctacctaygttcatgagttcaattgttttgattttgagatctcacaaattagtaagaacatgcaatgtttatctttctgtgcctggtttatttcacttaacacaatgacctccactttcatgcatgttgttgcaagtgacaggacctcattcatttttatggctgaatagtactccattatgtctatgtaccacattttctttatccattcatctgttgatgaacacataggttgcttccaaaccttaggtatggtgaacagtgctgcaacaaacataggagtgcagatatctctttgatgtactga

SEQ ID NO: 42 - DNA, 599 bp, Homo sapiens
ggagaataaatggcaccatgcaggaacaaggaagagaagtggacatgcattttttttctgtttttttttttctttttgagacggagtctcgctctgtcgccaggttggagtgcagtggcaccatctctgctcactgcaacctctgcctcccaggttcaagcaattctcccgcctcagcctcctgagtagctgggattacaagcatgtgccaccatgcccagctaatttttgtatttttagtagagatggagtttcgccacgttggccaggattgtctcgacctcttgaccttgtgattcrcttgccttggcatttattgatccatttataaactattgaccttgtaagaatgtctacagcagagtgtttaatttgtatgtctattcattaaaactcctttgattgatagttaattggtttataatattagtttcaagactaaacaagctgtgtatgtaacatttgatctttcagttacaggctttatcacaaaaaagtaatgctgtatctctttttcctggatttttatccacctgaaatttctgatgtccacaatggtcccacctggctatctactttctgcacatattttcacgtgt

SEQ ID NO: 43 - DNA, 599 bp, Homo sapiens
aaaaaaaaagataaacacttttacctctagtaactgatcacaacaaagctgccatttcataccatgggagactccatggttatccagaatcaaaggtctttcattccctgccctcttgccaagccacatttcaggagtcagcattgttctaatggatgccatttgtctttacactatctgaagtgagccagacttcaaggtttgagagcacagtctcccagactgcaaagtttgcccaagcctctgatactccctgcaaggaggtcccacaaggttagggggcatggttttaggacttcygtcacctctgacctaactgcaagttcaggaagtttccaaaacgaccttcaggttcaaaaattcactaaaaagaatcacagaactctttgaaagctgttatactcacagttacagtttatttcagggaaaggatagagatcaaaattagccaaagaaagagattgatagagcagagtctgagagggttccaaatgtgaagcctctggggtcctcagaatgcattaccctgctgatttggatgtgtgagacaacacatatagagtactgccaatcagggacactcacctgagcttcagcat

SEQ ID NO: 44 - DNA, 599 bp, Homo sapiens
acacatattttaattaaatagcttcatatttagcttcaagaagatgagtactggccatatatttgaatatatatgctatattagtttaaatctcatgtcagatgatttgcaggtctttttatttgcatgtttatgcagctaagatgtttggcgctcagttcttgtgggagggggcagcttggtatggaaagaacttggagtttgaaatctcactgtcctggatttgaatctcagctgttacatggccttgagcaggctacttatctgattttttgaggtggattcttgtctgtaagatcragatagggaaacccaactctgaaagggttaaatgagataaggcatataaaatatcagtaacaggctcactggctcacacctgtaatcccagcactttgggaggccgagaggggagggtcgcttgagcccaggagtttgagaccaacctgggcaacatagcgagaccccgtttctattaaaaaaaaaaagaaacagaaaaacaaaaacaaaaaaaagaaaatatcgacaacagtgtctgatgctcagtaagggctaaacaaaattgagttactctaccaaggaaacgacaatagaatggt
